(19) United States
(12) Patent Application Publication
(10) Pub. No.: US 2004/0033942 A1
(43) Pub. Date: Feb. 19, 2004

(54) Transriotion factors

(76) Inventors: Jennifer L Jackson, Santa Cruz, CA (US); Mariah R Baughn, San Leandro, CA (US); Henry Yue, Sunnyvale, CA (US); Preeti G Lal, Santa Clara, CA (US); Dyung Aina M Lu, San Jose, CA (US); Chandra S Arvizu, San Jose, CA (US); Yalda Azimzai, Oakland, CA (US); Olga Bandman, Mountain View, CA (US); Y Tom Tang, San Jose, CA (US); Preete Bhanot, Bakersfield, CA (US); Purvi Shah, San Jose, CA (US); Janice Au-Yong, Brisbane, CA (US)

Correspondence Address: INCYTE CORPORATION (formerly known as Incyte, Genomics, Inc.), 3160 PORTER DRIVE, PALO ALTO, CA, 94304, US

(21) Appl. No.: 10/221,625

(22) PCT Filed: Mar. 13, 2001
(86) PCT No.: PCT/US01/08117

(51) Int. Cl. C12Q 1/68; C07H 21/04; C12N 9/22; C12P 21/02; C12N 5/06

(52) U.S. Cl. 514/12; 435/6; 435/69.1; 435/320.1; 435/325; 435/199; 536/23.2

(57) ABSTRACT

The invention provides human transcription factors (TRFX) and polynucleotides which identify and encode TRFX. The invention also provides expression vectors, host cells, antibodies, agonists, and antagonists. The invention also provides methods for diagnosing, treating, or preventing disorders associated with expression of TRFX.

### TECHNICAL FTELD

[0001] This invention relates to nucleic acid and amino acid sequences of transcription factors and to the use of these sequences in the diagnosis, treatment, and prevention of cell proliferative, autoimmune/inflammatory, neurological, and developmental disorders, and in the assessment of the effects of exogenous compounds on the expression of nucleic acid and amino acid sequences of transcription factors.

### BACKGROUND OF THE INVENTION

[0002] Multicellular organisms are comprised of diverse cell types that differ dramatically both in structure and function. The identity of a cell is determined by its characteristic pattern of gene expression, and different cell types express overlapping but distinct sets of genes throughout development. Spatial and temporal regulation of gene expression is critical for the control of cell proliferation, cell differentiation, apoptosis, and other processes that contribute to organism development. Furthermore, gene expression is regulated in response to extracellular signals that mediate cell-cell communication and coordinate the activities of different cell types. Appropriate gene regulation also ensures that cells function efficiently by expressing only those genes whose functions are required at a given time.

[0003] Transcriptional regulatory proteins are essential for the control of gene expression. Some of these proteins function as transcription factors that initiate, activate, repress, or terminate gene transcription. Transcription factors generally bind to promoter, enhancer, or upstream regulatory regions of a gene in a sequence-specific manner, although some factors bind regulatory elements within or downstream of the coding region. Transcription factors may bind to a specific region of DNA singly or as a complex with other accessory factors. (Reviewed in Lewin, B. (1990) Genes IV, Oxford University Press, New York, N.Y., pp. 554570.)

[0004] The double helix structure and repeated sequences of DNA create topological and chemical features which can be recognized by transcription factors. These features include hydrogen bond donor and acceptor groups, hydrophobic patches, major and minor grooves, and regular repeated stretches of sequence which induce distinct bends in the helix. Typically, transcription factors recognize specific DNA sequence motifs of about 20 nucleotides in length. Multiple adjacent transcription factor-binding motifs may be required for gene regulation.

[0005] Many transcription factors incorporate DNA-binding structural motifs which comprise either a helices or β sheets that bind to the major groove of DNA. Four well-characterized structural motifs are helix-turn-helix, zinc finger, leucine zipper, and helix-loop-helix. Proteins containing these motifs may act alone as monomers or form homo- or heterodimers that interact with DNA.

[0006] The zinc finger motif, which binds zinc ions, generally contains tandem repeats of about 30 amino acids consisting of periodically spaced cysteine and histidine residues. Examples of this sequence pattern include the C2H2-type and the C3HC4-type zinc fingers, and the PHD domain. (Lewin, supra; Aasland, R., et al. (1995) Trends Biochem. Sci 20:56-59.) Zinc finger proteins each contain an a helix and an antiparallel β sheet whose proximity and conformation are maintained by the zinc ion. Contact with DNA is made by the arginine preceding the a helix and by the second, third, and sixth residues of the a helix.

[0007] The leucine zipper motif comprises a stretch of amino acids rich in leucine which can form an amphipathic a helix. This structure provides the basis for dimerization of two leucine zipper proteins. The region adjacent to the leucine zipper is usually basic, and upon protein dimerization, is optimally positioned for binding to the major groove. Proteins containing such motifs are generally referred to as bZIP transcription factors. The helix-loop-helix motif (HLH) consists of a short a helix connected by a loop to a longer a helix. The loop is flexible and allows the two helices to fold back against each other and to bind to DNA. The transcription factor Myc contains a prototypical HLH motif. Most transcription factors contain characteristic DNA binding motifs, and variations on the above motifs and new motifs have been and are currently being characterized (Faisst, S. and S. Meyer (1992) Nucl. Acids Res. 20:3-26).

[0008] Mutations in transcription factors contribute to oncogenesis. This is likely due to the role of transcription factors in the expression of genes involved in cell proliferation. For example, mutations in transcription factors encoded by proto-oncogenes, such as Fos, Jun, Myc, Rel, and Spi1, may be oncogenic due to increased stimulation of cell proliferation. Conversely, mutations in transcription factors encoded by tumor suppressor genes, such as p53, RB1, and WT1, may be oncogenic due to decreased inhibition of cell proliferation. (Latchman, D. (1995) Gene Regulation: A Eukarvotic Perspective, Chapman and Hall, London, UK, pp 242-255.)

[0009] Gene expression is also affected by chromatin-associated proteins. In the nucleus, DNA is packaged into chromatin, the compact organization of which limits the accessibility of DNA to transcription factors and plays a key role in gene regulation. (Lewin, supra, pp. 409-410.) The compact structure of chromatin is determined and influenced by chromatin-associated proteins such as histones, high mobility group (HMG) proteins, helicases, and chromodomain proteins. There are five classes of histones, H1, H2A, H2B, H3, and H4, all of which are highly basic, low molecular weight proteins. The fundamental unit of chromatin, the nucleosome, consists of 200 base pairs of DNA associated with two copies each of H2A, H2B, H3, and H4. H1 links adjacent nucleosomes. HMG proteins are low molecular weight, non-histone proteins that may play a role in unwinding DNA and stabilizing single-stranded DNA. Helicases, which are DNA-dependent ATPases, unwind DNA, allowing access for transcription factors. Chromodomain proteins play a key role in the formation of highly-compacted, transcriptionally silent heterochromatin.

[0010] Many neoplastic disorders in humans can be attributed to inappropriate gene expression. Malignant cell growth may result from either excessive expression of tumor promoting genes or insufficient expression of tumor suppressor genes. (Cleary, M. L. (1992) Cancer Surv. 15:89-104.) Chromosomal translocations may also produce chimeric loci which fuse the coding sequence of one gene with the regulatory regions of a second unrelated gene. Such an arrangement often results in inappropriate gene transcription. The Wilms tumor suppressor gene product, WT1, is a protein containing a DNA-binding domain consisting of four zinc fingers and a proline-glutamine rich region capable of regulating transcription. (ExPASy PROSTIE document PR00049.) Deletions of the WT1 gene, or point mutations which destroy the DNA-binding activity of the protein are associated with development of the pediatric nephroblastoma, Wilms tumor, and Denys-Drash syndrome. (Rauscher, F. J. (1993) FASEB J. 7:896-903.)

[0011] Certain proteins enriched in glutamine are associated with various neurological disorders including spinocerebellar ataxia, bipolar effective disorder, schizophrenia, and autism. (Margolis, R. L. et al. (1997) Human Genetics 100:114-122.) These proteins contain regions with as many as 15 or more consecutive glutamine residues and may function as transcription factors with a potential role in regulation of neurodevelopment or neuroplasticity.

[0012] The immune system responds to infection or trauma by activating a cascade of events that coordinate the progressive selection, amplification, and mobilization of cellular defense mechanisms. A complex and balanced program of gene activation and repression is involved in this process. Hyperactivity of the immune system as a result of improper or insufficient regulation of gene expression may result in considerable tissue or organ damage. This damage is well documented in immunological responses associated with arthritis, allergens, heart attack, stroke, and infections. (Harrison's Principles of Internal Medicine, 13/e, McGraw Hill, Inc. and Teton Data Systems Software, 1996.) In particular, a zinc finger protein termed Staf50 (for Stimulated trans-acting factor of 50 kDa) is a transcriptional regulator and is induced in various cell lines by interferon-I and -II. Staf50 appears to mediate the antiviral activity of interferon by down-regulating the viral transcription directed by the long terminal repeat promoter region of human immunodeficiency virus type-1 in transfected cells (Tissot, C. (1995) J. Biol. Chem. 270:14891-14898).

[0013] The generation of multicellular organisms is based on the induction and coordination of cell differentiation at the appropriate stages of development. Differential gene expression confers the distinct identities of cells and tissues throughout the body. Failure to regulate gene expression during development could result in developmental disorders.

[0014] The discovery of new transcription factors and the polynucleotides encoding them satisfies a need in the art by providing new compositions which are useful in the diagnosis, prevention, and treatment of cell proliferative, autoimmune/inflanimatory, neurological, and developmental disorders, and in the assessment of the effects of exogenous compounds on the expression of nucleic acid and amino acid sequences of transcription factors.

### SUMMARY OF TEE INVENTION

[0015] The invention features purified polypeptides, transcription factors, referred to collectively as “TRFX” and individually as “TRFX-1,” “TRFX-2,” “TRFX-3,” “TRFX-4,” “TRFX-5,” “TRFX-6,” “TRFX-7,” “TRFX-8,” “TRFX-9,” “TRFX-10,” “TRFX-11,” “TRFX-12,” “TRFX-13,” “TRFX-14,” “TRFX-15,” “TRFX-16,” “TRFX-17,” “TRFX-18,” “TRFX-19,” “TRFX-20,” “TRFX-21,” “TRFX-22,” “TRFX-23,” “TRFX-24,” “TRFX-25,” “TRFX-26,” “TRFX-27,” “TRFX-28,” “TRFX-29,” “TRFX-30,” “TRFX-31,” “TRFX-32,” “TRFX-33,” “TRFX-34,” “TRFX-35,” “TRFX-36,” “TRFX-37,” “TRFX-38,” “TRFX-39,” “TRFX-40,” “TRFX-41,” “TRFX-42,” “TRFX-43,” “TRFX-44,” “TRFX-45,” “TRFX-46,” “TRFX-47,” “TRFX-48,” “TRFX-49,” “TRFX-50,” “TRFX-51,” “TRFX-52,” “TRFX-53,” “TRFX-54,” “TRFX-55,” “TRFX-56,” “TRFX-57,” “TRFX-58,” “TRFX-59,” “TRFX-60,” “TRFX-61,” “TRFX-62,” “TRFX-63,” “TRFX-64,” “TRFX-65,” “TRFX-66,” “TRFX-67,” “TRFX-68,” “TRFX-69,” “TRFX-70,” “TRFX-71,” “TRFX-72,” “TRFX-73,” “TRFX-74,” “TRFX-75,” “TRFX-76,” “TRFX-77,” “TRFX-78,” “TRFX-79,” “TRFX-80,” “TRFX-81,” “TRFX-82,” “TRFX-83,” “TRFX-84,” “TRFX-85,” “TRFX-86,” “TRFX-87,” “TRFX-88,” “TRFX-89,” “TRFX-90,” “TRFX-91,” “TRFX-92,” “TRFX-93,” “TRFX-94,” “TRFX-95,” “TRFX-96,” “TRFX-97,” “TRFX-98,” “TRFX-99,” “TRFX-100,” “TRFX-101,” “TRFX-102,” “TRFX-103,” “TRFX-104,” “TRFX-105,” “TRFX-106,” and “TRFX-107.” In one aspect, the invention provides an isolated polypeptide comprising an amino acid sequence selected from the group consisting of a) an amino acid sequence selected from the group consisting of SEQ ID NO:1-107, b) a naturally occurring amino acid sequence having at least 90% sequence identity to an amino acid sequence selected from the group consisting of SEQ ID NO:1-107, c) a biologically active fragment of an amino acid sequence selected from the group consisting of SEQ ID NO:1-107, and d) an immunogenic fragment of an amino acid sequence selected from the group consisting of SEQ ID NO:1-107. In one alternative, the invention provides an isolated polypeptide comprising the amino acid sequence of SEQ ID NO:1-107.

[0016] The invention further provides an isolated polynucleotide encoding a polypeptide comprising an amino acid sequence selected from the group consisting of a) an amino acid sequence selected from the group consisting of SEQ ID NO:1-107, b) a naturally occurring amino acid sequence having at least 90% sequence identity to an amino acid sequence selected from the group consisting of SEQ ID NO:1-107, c) a biologically active fragment of an amino acid sequence selected from the group consisting of SEQ ID NO:1-107, and d) an immunogenic fragment of an amino acid sequence selected from the group consisting of SEQ ID NO:1-107. In one alternative, the polynucleotide encodes a polypeptide selected from the group consisting of SEQ ID NO:1-107. In another alternative, the polynucleotide is selected from the group consisting of SEQ ID NO:108-214.

[0017] Additionally, the invention provides a recombinant polynucleotide comprising a promoter sequence operably linked to a polynucleotide encoding a polypeptide comprising an amino acid sequence selected from the group consisting of a) an amino acid sequence selected from the group consisting of SEQ ID NO:1-107, b) a naturally occurring amino acid sequence having at least 90% sequence identity to an amino acid sequence selected from the group consisting of SEQ ID NO:1-107, c) a biologically active fragment of an amino acid sequence selected from the group consisting of SEQ ID NO:1-107, and d) an immunogenic fragment of an amino acid sequence selected from the group consisting of SEQ ID NO:1-107. In one alternative, the invention provides a cell transformed with the recombinant polynucleotide. In another alternative, the invention provides a transgenic organism comprising the recombinant polynucleotide.

[0018] The invention also provides a method for producing a polypeptide comprising an amino acid sequence selected from the group consisting of a) an amino acid sequence selected from the group consisting of SEQ ID NO:1-107, b) a naturally occurring amino acid sequence having at least 90% sequence identity to an amino acid sequence selected from the group consisting of SEQ ID NO:1-107, c) a biologically active fragment of an amino acid sequence selected from the group consisting of SEQ ID NO:1-107, and d) an immunogenic fragment of an amino acid sequence selected from the group consisting of SEQ ID NO:1-107. The method comprises a) culturing a cell under conditions suitable for expression of the polypeptide, wherein said cell is transformed with a recombinant polynucleotide comprising a promoter sequence operably linked to a polynucleotide encoding the polypeptide, and b) recovering the polypeptide so expressed.

[0019] Additionally, the invention provides an isolated antibody which specifically binds to a polypeptide comprising an amino acid sequence selected from the group consisting of a) an amino acid sequence selected from the group consisting of SEQ ID NO:1-107, b) a naturally occurring amino acid sequence having at least 90% sequence identity to an amino acid sequence selected from the group consisting of SEQ ID NO:1-107, c) a biologically active fragment of an amino acid sequence selected from the group consisting of SEQ ID NO:1-107, and d) an immunogenic fragment of an amino acid sequence selected from the group consisting of SEQ ID NO:1-107.

[0020] The invention further provides an isolated polynucleotide comprising a polynucleotide sequence selected from the group consisting of a) a polynucleotide sequence selected from the group consisting of SEQ ID NO:108-214, b) a naturally occurring polynucleotide sequence having at least 90% sequence identity to a polynucleotide sequence selected from the group consisting of SEQ ID NO:108-214, c) a polynucleotide sequence complementary to a), d) a polynucleotide sequence complementary to b), and e) an RNA equivalent of a)-d). In one alternative, the polynucleotide comprises at least 60 contiguous nucleotides.

[0021] Additionally, the invention provides a method for detecting a target polynucleotide in a sample, said target polynucleotide having a sequence of a polynucleotide comprising a polynucleotide sequence selected from the group consisting of a) a polynucleotide sequence selected from the group consisting of SEQ ID NO:108-214, b) a naturally occurring polynucleotide sequence having at least 90% sequence identity to a polynucleotide sequence selected from the group consisting of SEQ ID NO:108-214, c) a polynucleotide sequence complementary to a), d) a polynucleotide sequence complementary to b), and e) an RNA equivalent of a)-d). The method comprises a) hybridizing the sample with a probe comprising at least 20 contiguous nucleotides comprising a sequence complementary to said target polynucleotide in the sample, and which probe specifically hybridizes to said target polynucleotide, under conditions whereby a hybridization complex is formed between said probe and said target polynucleotide or fragments thereof, and b) detecting the presence or absence of said hybridization complex, and optionally, if present, the amount thereof. In one alternative, the probe comprises at least 60 contiguous nucleotides.

[0022] The invention further provides a method for detecting a target polynucleotide in a sample, said target polynucleotide having a sequence of a polynucleotide comprising a polynucleotide sequence selected from the group consisting of a) a polynucleotide sequence selected from the group consisting of SEQ ID NO:108-214, b) a naturally occurring polynucleotide sequence having at least 90% sequence identity to a polynucleotide sequence selected from the group consisting of SEQ ID NO:108-214, c) a polynucleotide sequence complementary to a), d) a polynucleotide sequence complementary to b), and e) an RNA equivalent of a)-d). The method comprises a) amplifying said target polynucleotide or fragment thereof using polymerase chain reaction amplification, and b) detecting the presence or absence of said amplified target polynucleotide or fragment thereof, and, optionally, if present, the amount thereof.

[0023] The invention further provides a composition comprising an effective amount of a polypeptide comprising an amino acid sequence selected from the group consisting of a) an amino acid sequence selected from the group consisting of SEQ ID NO:1-107, b) a natually occurring amino acid sequence having at least 90% sequence identity to an amino acid sequence selected from the group consisting of SEQ ID NO:1-107, c) a biologically active fragment of an amino acid sequence selected from the group consisting of SEQ ID NO:1-107, and d) an immunogenic fragment of an amino acid sequence selected from the group consisting of SEQ ID NO:1-107, and a pharmaceutically acceptable excipient. In one embodiment, the composition comprises an amino acid sequence selected from the group consisting of SEQ ID NO:1-107. The invention additionally provides a method of treating a disease or condition associated with decreased expression of functional TRFX, comprising administering to a patient in need of such treatment the composition.

[0024] The invention also provides a method for screening a compound for effectiveness as an agonist of a polypeptide comprising an amino acid sequence selected from the group consisting of a) an amino acid sequence selected from the group consisting of SEQ ID NO:1-107, b) a naturally occurring amino acid sequence having at least 90% sequence identity to an amino acid sequence selected from the group consisting of SEQ ID NO:1-107, c) a biologically active fragment of an amino acid sequence selected from the group consisting of SEQ ID NO:1-107, and d) an immunogenic fragment of an amino acid sequence selected from the group consisting of SEQ ID NO:1-107. The method comprises a) exposing a sample comprising the polypeptide to a compound, and b) detecting agonist activity in the sample. In one alternative, the invention provides a composition comprising an agonist compound identified by the method and a pharmaceutically acceptable excipient. In another alternative, the invention provides a method of treating a disease or condition associated with decreased expression of functional TRFX, comprising administering to a patient in need of such treatment the composition.

[0025] Additionally, the invention provides a method for screening a compound for effectiveness as an antagonist of a polypeptide comprising an amino acid sequence selected from the group consisting of a) an amino acid sequence selected from the group consisting of SEQ ID NO:1-107, b) a naturally occurring amino acid sequence having at least 90% sequence identity to an amino acid sequence selected from the group consisting of SEQ ID NO:1-107, c) a biologically active fragment of an amino acid sequence selected from the group consisting of SEQ ID NO:1-107, and d) an immunogenic fragment of an amino acid sequence selected from the group consisting of SEQ ID NO:1-107. The method comprises a) exposing a sample comprising the polypeptide to a compound, and b) detecting antagonist activity in the sample. In one alternative, the invention provides a composition comprising an antagonist compound identified by the method and a pharmaceutically acceptable excipient. In another alternative, the invention provides a method of treating a disease or condition associated with overexpression of functional TRFX, comprising adminstering to a patient in need of such treatment the composition.

[0026] The invention further provides a method of screening for a compound that specifically binds to a polypeptide comprising an amino acid sequence selected from the group consisting of a) an amino acid sequence selected from the group consisting of SEQ ID NO:1-107, b) a naturally occurring amino acid sequence having at least 90% sequence identity to an amino acid sequence selected from the group consisting of SEQ ID NO:1-107, c) a biologically active fragment of an amino acid sequence selected from the group consisting of SEQ ID NO:1-107, and d) an immunogenic fragment of an amino acid sequence selected from the group consisting of SEQ ID NO:1-107. The method comprises a) combining the polypeptide with at least one test compound under suitable conditions, and b) detecting binding of the polypeptide to the test compound, thereby identifying a compound that specifically binds to the polypeptide.

[0027] The invention further provides a method of screening for a compound that modulates the activity of a polypeptide comprising an amino acid sequence selected from the group consisting of a) an amino acid sequence selected from the group consisting of SEQ ID NO:1-107, b) a naturally occurring amino acid sequence having at least 90% sequence identity to an amino acid sequence selected from the group consisting of SEQ ID NO:1-107, c) a biologically active fragment of an amino acid sequence selected from the group consisting of SEQ ID NO:1-107, and d) an immunogenic fragment of an amino acid sequence selected from the group consisting of SEQ ID NO:1-107. The method comprises a) combining the polypeptide with at least one test compound under conditions permissive for the activity of the polypeptide, b) assessing the activity of the polypeptide in the presence of the test compound, and c) comparing the activity of the polypeptide in the presence of the test compound with the activity of the polypeptide in the absence of the test compound, wherein a change in the activity of the polypeptide in the presence of the test compound is indicative of a compound that modulates the activity of the polypeptide.

[0028] The invention further provides a method for screening a compound for effectiveness in altering expression of a target polynucleotide, wherein said target polynucleotide comprises a sequence selected from the group consisting of SEQ ID NO:108-214, the method comprising a) exposing a sample comprising the target polynucleotide to a compound, and b) detecting altered expression of the target polynucleotide.

[0029] The invention further provides a method for assessing toxicity of a test compound, said method comprising a) treating a biological sample containing nucleic acids with the test compound; b) hybridizing the nucleic acids of the treated biological sample with a probe comprising at least 20 contiguous nucleotides of a polynucleotide comprising a polynucleotide sequence selected from the group consisting of i) a polynucleotide sequence selected from the group consisting of SEQ ID NO:108-214, ii) a naturally occurring polynucleotide sequence having at least 90% sequence identity to a polynucleotide sequence selected from the group consisting of SEQ ID NO:108-214, iii) a polynucleotide sequence complementary to i), iv) a polynucleotide sequence complementary to ii), and v) an RNA equivalent of i)-iv). Hybridization occurs under conditions whereby a specific hybridization complex is formed between said probe and a target polynucleotide in the biological sample, said target polynucleotide comprising a polynucleotide sequence selected from the group consisting of i) a polynucleotide sequence selected from the group consisting of SEQ ID NO:108-214, ii) a naturally occurring polynucleotide sequence having at least 90% sequence identity to a polynucleotide sequence selected from the group consisting of SEQ ID NO:108-214, iii) a polynucleotide sequence complementary to i), iv) a polynucleotide sequence complementary to ii), and v) an RNA equivalent of i)-iv). Alternatively, the target polynucleotide comprises a fragment of a polynucleotide sequence selected from the group consisting of i)-v) above; c) quantifying the amount of hybridization complex; and d) comparing the amount of hybridization complex in the treated biological sample with the amount of hybridization complex in an untreated biological sample, wherein a difference in the amount of hybridization complex in the treated biological sample is indicative of toxicity of the test compound.

### BRIEF DESCRIPTION OF THE TABLES

[0030] Table 1 shows polypeptide and nucleotide sequence identification numbers (SEQ ID NOs), clone identification numbers (clone IDs), cDNA libraries, and cDNA fragments used to assemble full-length sequences encoding TRFX.

[0031] Table 2 shows features of each polypeptide sequence, including potential motifs, homologous sequences, and methods, algorithms, and searchable databases used for analysis of TRFX.

[0032] Table 3 shows the tissue-specific expression patterns of each nucleic acid sequence as determined by northern analysis; diseases, disorders, or conditions associated with these tissues; and the vector into which each cDNA was cloned.

[0033] Table 4 describes the tissues used to construct the cDNA libraries from which cDNA clones encoding TRFX were isolated.

[0034] Table 5 shows the tools, programs, and algorithms used to analyze the polynucleotides and polypeptides of the invention, along with applicable descriptions, references, and threshold parameters.

### DESCREPTION OF TIHE INVENITON

[0035] Before the present proteins, nucleotide sequences, and methods are described, it is understood that this invention is not limited to the particular machines, materials and methods described, as these may vary. It is also to be understood that the terminology used herein is for the purpose of describing particular embodiments only, and is not intended to limit the scope of the present invention which will be limited only by the appended claims.

[0036] It must be noted that as used herein and in the appended claims, the singular forms “a,” “an,” and “the” include plural reference unless the context clearly dictates otherwise. Thus, for example, a reference to “a host cell” includes a plurality of such host cells, and a reference to “an antibody” is a reference to one or more antibodies and equivalents thereof known to those skilled in the art, and so forth.

[0037] Unless defined otherwise, all technical and scientific terms used herein have the same meanings as commonly understood by one of ordinary skill in the art to which this invention belongs. Although any machines, materials, and methods similar or equivalent to those described herein can be used to practice or test the present invention, the preferred machines, materials and methods are now described. All publications mentioned herein are cited for the purpose of describing and disclosing the cell lines, protocols, reagents and vectors which are reported in the publications and which might be used in connection with the invention. Nothing herein is to be construed as an admission that the invention is not entitled to antedate such disclosure by virtue of prior invention.

[0038] Definitions

[0039] “ThFx” refers to the amino acid sequences of substantially purified TRFX obtained from any species, particularly a mammalian species, including bovine, ovine, porcine, murine, equine, and human, and from any source, whether natural, synthetic, semi-synthetic, or recombinant.

[0040] The term “agonist” refers to a molecule which intensifies or mimics the biological activity of TRFX. Agonists may include proteins, nucleic acids, carbohydrates, small molecules, or any other compound or composition which modulates the activity of TRFX either by directly interacting with TRFX or by acting on components of the biological pathway in which TRFX participates.

[0041] An “allelic variant” is an alternative form of the gene encoding TRFX. Allelic variants may result from at least one mutation in the nucleic acid sequence and may result in altered mRNAs or in polypeptides whose structure or function may or may not be altered. A gene may have none, one, or many allelic variants of its naturally occurring form. Common mutational changes which give rise to allelic variants are generally ascribed to natural deletions, additions, or substitutions of nucleotides. Each of these types of changes may occur alone, or in combination with the others, one or more times in a given sequence.

[0042] “Altered” nucleic acid sequences encoding TRFX include those sequences with deletions, insertions, or substitutions of different nucleotides, resulting in a polypeptide the same as TRFX or a polypeptide with at least one functional characteristic of TRFX. Included within this definition are polymorphisms which may or may not be readily detectable using a particular oligonucleotide probe of the polynucleotide encoding TRFX, and improper or unexpected hybridization to allelic variants, with a locus other than the normal chromosomal locus for the polynucleotide sequence encoding TRFX. The encoded protein may also be “altered,” and may contain deletions, insertions, or substitutions of amino acid residues which produce a silent change and result in a functionally equivalent TRPX. Deliberate amino acid substitutions may be made on the basis of similarity in polarity, charge, solubility, hydrophobicity, hydrophilicity, and/or the amphipathic nature of the residues, as long as the biological or immunological activity of TRFX is retained. For example, negatively charged amino acids may include aspartic acid and glutamic acid, and positively charged amino acids may include lysine and arginine. Amino acids with uncharged polar side chains having similar hydrophilicity values may include: asparagine and glutamine; and serine and threonine. Amino acids with uncharged side chains having similar hydrophilicity values may include: leucine, isoleucine, and valine; glycine and alanine; and phenylalanine and tyrosine.

[0043] The terms “amino acid” and “amino acid sequence” refer to an oligopeptide, peptide, polypeptide, or protein sequence, or a fragment of any of these, and to naturally occurring or synthetic molecules. Where “amino acid sequence” is recited to refer to a sequence of a naturally occurring protein molecule, “amino acid sequence” and like terms are not meant to limit the amino acid sequence to the complete native amino acid sequence associated with the recited protein molecule.

[0044] “Amplification” relates to the production of additional copies of a nucleic acid sequence. Amplification is generally carried out using polymerase chain reaction (PCR) technologies well known in the art.

[0045] The term “antagonist” refers to a molecule which inhibits or attenuates the biological activity of TRFX. Antagonists may include proteins such as antibodies, nucleic acids, carbohydrates, small molecules, or any other compound or composition which modulates the activity of TRFX either by directly interacting with TRFX or by acting on components of the biological pathway in which TRFX participates.

[0046] The term “antibody” refers to intact immunoglobulin molecules as well as to fragments thereof, such as Fab, F(ab′), and Fv fragments, which are capable of binding an epitopic determinant. Antibodies that bind TRFX polypeptides can be prepared using intact polypeptides or using fragments containing small peptides of interest as the immunizing antigen. The polypeptide or oligopeptide used to immunize an animal (e.g., a mouse, a rat, or a rabbit) can be derived from the translation of RNA, or synthesized chemically, and can be conjugated to a carrier protein if desired. Commonly used carriers that are chemically coupled to peptides include bovine serum albumin, thyroglobulin, and keyhole limpet hemocyanin (KLH). The coupled peptide is then used to immunize the animal.

[0047] The term “antigenic determinant” refers to that region of a molecule (i.e., an epitope) that makes contact with a particular antibody. When a protein or a fragment of a protein is used to immunize a host animal, numerous regions of the protein may induce the production of antibodies which bind specifically to antigenic determinants (particular regions or threedimensional structures on the protein). An antigenic determinant may compete with the intact antigen (i.e., the immunogen used to elicit the immune response) for binding to an antibody.

[0048] The term “antisense” refers to any composition capable of base-pairing with the “sense” (coding) strand of a specific nucleic acid sequence. Antisense compositions may include DNA; RNA; peptide nucleic acid LENA); oligonucleotides having modified backbone linkages such as phosphorothioates, methylphosphonates, or benzylphosphonates; oligonucleotides having modified sugar groups such as 2′-methoxyethyl sugars or 2′-methoxyethoxy sugars; or oligonucleotides having modified bases such as 5-methyl cytosine, 2′-deoxyuracil, or 7-deaza-2′-deoxyguanosine. Antisense molecules may be produced by any method including chemical synthesis or transcription. Once introduced into a cell, the complementary antisense molecule base-pairs with a naturally occurring nucleic acid sequence produced by the cell to form duplexes which block either transcription or translation. The designation “negative” or “minus” can refer to the antisense strand, and the designation “positive” or “plus” can refer to the sense strand of a reference DNA molecule.

[0049] The term “biologically active” refers to a protein having structural, regulatory, or biochemical functions of a naturally occurring molecule. Likewise, “immunologically active” or “immunogenic” refers to the capability of the natural, recombinant, or synthetic TRFX, or of any oligopeptide thereof, to induce a specific immune response in appropriate animals or cells and to bind with specific antibodies.

[0050] “Complementary” describes the relationship between two single-stranded nucleic acid sequences that anneal by base-pairing. For example, 5′-AGT-3′ pairs with its complement, 3′-TCA-5′.

[0051] A “composition comprising a given polynucleotide sequence” and a “composition comprising a given amino acid sequence” refer broadly to any composition containing the given polynucleotide or amino acid sequence. The composition may comprise a dry formulation or an aqueous solution. Compositions comprising polynucleotide sequences encoding TRFX or fragments of TRFX may be employed as hybridization probes. The probes may be stored in freeze-dried form and may be associated with a stabilizing agent such as a carbohydrate. In hybridizations, the probe may be deployed in an aqueous solution containing salts (e.g., NaCl), detergents (e.g., sodium dodecyl sulfate; SDS), and other components (e.g., Denhardt's solution, dry milk, salmon sperm DNA, etc.).

[0052] “Consensus sequence” refers to a nucleic acid sequence which has been subjected to repeated DNA sequence analysis to resolve uncalled bases, extended using the XL-PCR kit (Applied Biosystems, Foster City Calif.) in the 5′ and/or the 3′ direction, and resequenced, or which has been assembled from one or more overlapping cDNA, EST, or genomic DNA fragments using a computer program for fragment assembly, such as the GELVIEW fragment assembly system (GCG, Madison Wis.) or Phrap (University of Washington, Seattle Wash.). Some sequences have been both extended and assembled to produce the consensus sequence.

[0053] “Conservative amino acid substitutions” are those substitutions that are predicted to least interfere with the properties of the original protein, i.e., the structure and especially the function of the protein is conserved and not significantly changed by such substitutions. The table below shows amino acids which may be substituted for an original amino acid in a protein and which are regarded as conservative amino acid substitutions.

| Original Residue | Conservative Substitution |
|---|---|
| Ala | Gly, Ser |
| Arg | His, Lys |
| Asn | Asp, Gln, His |
| Asp | Asn, Glu |
| Cys | Ala, Ser |
| Gln | Asn, Glu, His |
| Glu | Asp, Gln, His |
| Gly | Ala |
| His | Asn, Arg, Gln, Glu |
| Ile | Leu, Val |
| Leu | Ile, Val |
| Lys | Arg, Gln, Glu |
| Met | Leu, Ile |
| Phe | His, Met, Leu, Trp, Tyr |
| Ser | Cys, Thr |
| Thr | Ser, Val |
| Trp | Phe, Tyr |
| Tyr | His, Phe, Trp |
| Val | Ile, Leu, Thr |

[0054] Conservative amino acid substitutions generally maintain (a) the structure of the polypeptide backbone in the area of the substitution, for example, as a beta sheet or alpha helical conformation, (b) the charge or hydrophobicity of the molecule at the site of the substitution, and/or (c) the bulk of the side chain.

[0055] A “deletion” refers to a change in the amino acid or nucleotide sequence that results in the absence of one or more amino acid residues or nucleotides.

[0056] The term “derivative” refers to a chemically modified polynucleotide or polypeptide. Chemical modifications of a polynucleotide sequence can include, for example, replacement of hydrogen by an alkyl, acyl, hydroxyl, or amino group. A derivative polynucleotide encodes a polypeptide which retains at least one biological or immunological function of the natural molecule. A derivative polypeptide is one modified by glycosylation, pegylation, or any similar process that retains at least one biological or immunological function of the polypeptide from which it was derived.

[0057] A “detectable label” refers to a reporter molecule or enzyme that is capable of generating a measurable signal and is covalently or noncovalently joined to a polynucleotide or polypeptide.

[0058] A “fragment” is a unique portion of TRFX or the polynucleotide encoding TRFX which is identical in sequence to but shorter in length than the parent sequence. A fragment may comprise up to the entire length of the defined sequence, minus one nucleotide/amino acid residue. For example, a fragment may comprise from 5 to 1000 contiguous nucleotides or amino acid residues. A fragment used as a probe, primer, antigen, therapeutic molecule, or for other purposes, may be at least 5, 10, 15, 16, 20, 25, 30, 40, 50, 60, 75, 100, 150, 250 or at least 500 contiguous nucleotides or amino acid residues in length. Fragments may be preferentially selected from certain regions of a molecule. For example, a polypeptide fragment may comprise a certain length of contiguous amino acids selected from the first 250 or 500 amino acids (or first 25% or 50% of a polypeptide) as shown in a certain defined sequence. Clearly these lengths are exemplary, and any length that is supported by the specification, including the Sequence Listing, tables, and figures, may be encompassed by the present embodiments.

[0059] A fragment of SEQ ID NO:108-214 comprises a region of unique polynucleotide sequence that specifically identifies SEQ ID NO:108-214, for example, as distinct from any other sequence in the genome from which the fragment was obtained. A fragment of SEQ ID NO:108-214 is useful, for example, in hybridization and amplification technologies and in analogous methods that distinguish SEQ ID NO:108-214 from related polynucleotide sequences. The precise length of a fragment of SEQ ID NO:108-214 and the region of SEQ ID NO:108-214 to which the fragment corresponds are routinely determinable by one of ordinary skill in the art based on the intended purpose for the fragment.

[0060] A fragment of SEQ ID NO:1-107 is encoded by a fragment of SEQ ID NO:108-214. A fragment of SEQ ID NO:1-107 comprises a region of unique amino acid sequence that specifically identifies SEQ ID NO:1-107. For example, a fragment of SEQ ID NO:1-107 is useful as an immunogenic peptide for the development of antibodies that specifically recognize SEQ ID NO:1-107. The precise length of a fragment of SEQ ID NO:1-107 and the region of SEQ ID NO:1-107 to which the fragment corresponds are routinely determinable by one of ordinary skill in the art based on the intended purpose for the fragment.

[0061] A “full-length” polynucleotide sequence is one containing at least a translation initiation codon (e.g., methionine) followed by an open reading frame and a translation termination codon. A “full-length” polynucleotide sequence encodes a “full-length” polypeptide sequence.

[0062] “Homology” refers to sequence similarity or, interchangeably, sequence identity, between two or more polynucleotide sequences or two or more polypeptide sequences.

[0063] The terms “percent identity” and “% identity,” as applied to polynucleotide sequences, refer to the percentage of residue matches between at least two polynucleotide sequences aligned using a standardized algorithim Such an algorithm may insert, in a standardized and reproducible way, gaps in the sequences being compared in order to optimize alignment between two sequences, and therefore achieve a more meaningful comparison of the two sequences.

[0064] Percent identity between polynucleotide sequences may be determined using the default parameters of the CLUSTAL V algorithm as incorporated into the MEGALIGN version 3.12e sequence alignment program. This program is part of the LASERGENE software package, a suite of molecular biological analysis programs (DNASTAR, Madison Wis.). CLUSTAL V is described in Higgins, D. G. and P. M. Sharp (1989) CABIOS 5:151-153 and in Higgins, D. G. et al. (1992) CABIOS 8:189-191. For pairwise alignments of polynucleotide sequences, the default parameters are set as follows: Ktuple=2, gap penalty=5, window=4, and “diagonals saved”=4. The “weighted” residue weight table is selected as the default. Percent identity is reported by CLUSTAL V as the “percent similarity” between aligned polynucleotide sequences.

[0065] Alternatively, a suite of commonly used and freely available sequence comparison algorithms is provided by the National Center for Biotechnology Information (NCBI) Basic Local Alignment Search Tool (BLAST) (Altschul, S. F. et al. (1990) J. Mol. Biol. 215:403-410), which is available from several sources, including the NCBI, Bethesda, Md., and on the Internet at http://www.ncbi.nlm.nih.gov/BLAST/. The BLAST software suite includes various sequence analysis programs including “blastn,” that is used to align a known polynucleotide sequence with other polynucleotide sequences from a variety of databases. Also available is a tool called “BLAST 2 Sequences” that is used for direct pairwise comparison of two nucleotide sequences. “BLAST2 Sequences” can be accessed and used interactively at http://www.ncbi.nlm.nih.gov/gorf/bl2.html. The “BLAST 2 Sequences” tool can be used for both blastn and blastp (discussed below). BLAST programs are commonly used with gap and other parameters set to default settings. For example, to compare two nucleotide sequences, one may use blastn with the “BLAST 2 Sequences” tool Version 2.0.12 (Apr. 21, 2000) set at default parameters. Such default parameters may be, for example:

[0066] Matrix: BLOSUM62

[0067] Reward for match: 1

[0068] Penalty for mismatch: −2

[0069] Open Gap: 5 and Extension Gap: 2 penalties

[0070] Gap×drop-off 50

[0071] Expect: 10

[0072] Word Size: 11

[0073] Filter: on

[0074] Percent identity may be measured over the length of an entire defined sequence, for example, as defined by a particular SEQ ID number, or may be measured over a shorter length, for example, over the length of a fragment taken from a larger, defined sequence, for instance, a fragment of at least 20, at least 30, at least 40, at least 50, at least 70, at least 100, or at least 200 contiguous nucleotides. Such lengths are exemplary only, and it is understood that any fragment length supported by the sequences shown herein, in the tables, figures, or Sequence Listing, may be used to describe a length over which percentage identity may be measured.

[0075] Nucleic acid sequences that do not show a high degree of identity may nevertheless encode similar amino acid sequences due to the degeneracy of the genetic code. It is understood that changes in a nucleic acid sequence can be made using this degeneracy to produce multiple nucleic acid sequences that all encode substantially the same protein.

[0076] The phrases “percent identity” and “% identity,” as applied to polypeptide sequences, refer to the percentage of residue matches between at least two polypeptide sequences aligned using a standardized algorithm. Methods of polypeptide sequence alignment are well-known. Some alignment methods take into account conservative amino acid substitutions. Such conservative substitutions, explained in more detail above, generally preserve the charge and hydrophobicity at the site of substitution, thus preserving the structure (and therefore function) of the polypeptide.

[0077] Percent identity between polypeptide sequences may be determined using the default parameters of the CLUSTAL V algorithm as incorporated into the MEGALIGN version 3.12e sequence alignment program (described and referenced above). For pairwise alignments of polypeptide sequences using CLUSTAL V, the default parameters are set as follows: Ktuple=1, gap penalty=3, window=5, and “diagonals saved”=5. The PAM250 matrix is selected as the default residue weight table. As with polynucleotide alignments, the percent identity is reported by CLUSTAL V as the “percent similarity” between aligned polypeptide sequence pairs.

[0078] Alternatively the NCBI BLAST software suite may be used. For example, for a pairwise comparison of two polypeptide sequences, one may use the “BLAST 2 Sequences” tool Version 2.0.12 (Apr. 21, 2000) with blastp set at default parameters. Such default parameters may be, for example:

[0079] Matrix: BLOSUM62

[0080] Open Gap: 11 and Extension Gap: 1 penalties

[0081] Gap×drop-off: 50

[0082] Expect: 10

[0083] Word Size: 3

[0084] Filter: on

[0085] Percent identity may be measured over the length of an entire defined polypeptide sequence, for example, as defined by a particular SEQ ID number, or may be measured over a shorter length, for example, over the length of a fragment taken from a larger, defined polypeptide sequence, for instance, a fragment of at least 15, at least 20, at least 30, at least 40, at least 50, at least 70 or at least 150 contiguous residues. Such lengths are exemplary only, and it is understood that any fragment length supported by the sequences shown herein, in the tables, figures or Sequence Listing, may be used to describe a length over which percentage identity may be measured.

[0086] “Human artificial chromosomes” (HACS) are linear microchromosomes which may contain DNA sequences of about 6 kb to 10 Mb in size, and which contain all of the elements required for chromosome replication, segregation and maintenance.

[0087] The term “humanized antibody” refers to an antibody molecule in which the amino acid sequence in the non-antigen binding regions has been altered so that the antibody more closely resembles a human antibody, and still retains its original binding ability.

[0088] “Hybridization” refers to the process by which a polynucleotide strand anneals with a complementary strand through base pairing under defined hybridization conditions. Specific hybridization is an indication that two nucleic acid sequences share a high degree of complementarity. Specific hybridization complexes form under permissive annealing conditions and remain hybridized after the “washing” step(s). The washing step(s) is particularly important in determining the stringency of the hybridization process, with more stringent conditions allowing less non-specific binding, i.e., binding between pairs of nucleic acid strands that are not perfectly matched. Permissive conditions for annealing of nucleic acid sequences are routinely determinable by one of ordinary skill in the art and may be consistent among hybridization experiments, whereas wash conditions may be varied among experiments to achieve the desired stringency, and therefore hybridization specificity. Permissive annealing conditions occur, for example, at 68° C. in the presence of about 6×SSC, about 1% (w/v) SDS, and about 100 μg/ml sheared, denatured salmon sperm DNA.

[0089] Generally, stringency of hybridization is expressed, in part, with reference to the temperature under which the wash step is carried out. Such wash temperatures are typically selected to be about 5° C. to 20° C. lower than the thermal melting point (Tₘ) for the specific sequence at a defined ionic strength and pH. The Tₘ is the temperature (under defined ionic strength and pH) at which 50% of the target sequence hybridizes to a perfectly matched probe. An equation for calculating Tₘ and conditions for nucleic acid hybridization are well known and can be found in Sambrook, J. et al., 1989, Molecular Cloning: A Laboratory Manual, 2^{nd} ed., vol. 1-3, Cold Spring Harbor Press, Plainview N.Y.; specifically see volume 2, chapter 9.

[0090] High stringency conditions for hybridization between polynucleotides of the present invention include wash conditions of 68° C. in the presence of about 0.2×SSC and about 0.1% SDS, for 1 hour. Alternatively, temperatures of about 65° C., 60° C., 55° C., or 42° C. may be used. SSC concentration may be varied from about 0.1 to 2×SSC, with SDS being present at about 0.1%. Typically, blocking reagents are used to block non-specific hybridization. Such blocking reagents include, for instance, sheared and denatured salmon sperm DNA at about 100-200 μg/ml. Organic solvent, such as formamide at a concentration of about 35-50% v/v, may also be used under particular circumstances, such as for RNA:DNA hybridizations. Useful variations on these wash conditions will be readily apparent to those of ordinary skill in the art. Hybridization, particularly under high stringency conditions, may be suggestive of evolutionary similarity between the nucleotides. Such similarity is strongly indicative of a similar role for the nucleotides and their encoded polypeptides.

[0091] The term “hybridization complex” refers to a complex formed between two nucleic acid sequences by virtue of the formation of hydrogen bonds between complementary bases. A hybridization complex may be formed in solution (e.g., C₀t or R₀t analysis) or formed between one nucleic acid sequence present in solution and another nucleic acid sequence immobilized on a solid support (e.g., paper, membranes, filters, chips, pins or glass slides, or any other appropriate substrate to which cells or their nucleic acids have been fixed).

[0092] The words “insertion” and “addition” refer to changes in an amino acid or nucleotide sequence resulting in the addition of one or more amino acid residues or nucleotides, respectively.

[0093] “Immune response” can refer to conditions associated with inflammation, trauma, immune disorders, or infectious or genetic disease, etc. These conditions can be characterized by expression of various factors, e.g., cytokines, chemokines, and other signaling molecules, which may affect cellular and systemic defense systems.

[0094] An “immunogenic fragment” is a polypeptide or oligopeptide fragment of TRFX which is capable of eliciting an immune response when introduced into a living organism, for example, a mammal. The term “immunogenic fragment” also includes any polypeptide or oligopeptide fragment of TRFX which is useful in any of the antibody production methods disclosed herein or known in the art.

[0095] The term “microarray” refers to an arrangement of a plurality of polynucleotides, polypeptides, or other chemical compounds on a substrate.

[0096] The terms “element” and “array element” refer to a polynucleotide, polypeptide, or other chemical compound having a unique and defined position on a microarray.

[0097] The term “modulate” refers to a change in the activity of TRFX. For example, modulation may cause an increase or a decrease in protein activity, binding characteristics, or any other biological, functional, or immunological properties of TRFX.

[0098] The phrases “nucleic acid” and “nucleic acid sequence” refer to a nucleotide, oligonucleotide, polynucleotide, or any fragment thereof. These phrases also refer to DNA or RNA of genomic or synthetic origin which may be single-stranded or double-stranded and may represent the sense or the antisense strand, to peptide nucleic acid (PNA), or to any DNA-like or RNA-like material.

[0099] “Operably linked” refers to the situation in which a first nucleic acid sequence is placed in a functional relationship with a second nucleic acid sequence. For instance, a promoter is operably linked to a coding sequence if the promoter affects the transcription or expression of the coding sequence. Operably linked DNA sequences may be in close proximity or contiguous and, where necessary to join two protein coding regions, in the same reading frame.

[0100] “Peptide nucleic acid” (PNA) refers to an antisense molecule or anti-gene agent which comprises an oligonucleotide of at least about 5 nucleotides in length linked to a peptide backbone of amino acid residues ending in lysine. The terminal lysine confers solubility to the composition. PNAs preferentially bind complementary single stranded DNA or RNA and stop transcript elongation, and may be pegylated to extend their lifespan in the cell.

[0101] “Post-translational modification” of an TRFX may involve lipidation, glycosylation, phosphorylation, acetylation, racemization, proteolytic cleavage, and other modifications known in the art. These processes may occur synthetically or biochemically. Biochemical modifications will vary by cell type depending on the enzymatic milieu of TRFX.

[0102] “Probe” refers to nucleic acid sequences encoding TRFX, their complements, or fragments thereof, which are used to detect identical, allelic or related nucleic acid sequences. Probes are isolated oligonucleotides or polynucleotides attached to a detectable label or reporter molecule. Typical labels include radioactive isotopes, ligands, chemiluminescent agents, and enzymes. “Primers” are short nucleic acids, usually DNA oligonucleotides, which may be annealed to a target polynucleotide by complementary base-pairing. The primer may then be extended along the target DNA strand by a DNA polymerase enzyme. Primer pairs can be used for amplification (and identification) of a nucleic acid sequence, e.g., by the polymerase chain reaction (PCR).

[0103] Probes and primers as used in the present invention typically comprise at least 15 contiguous nucleotides of a known sequence. In order to enhance specificity, longer probes and primers may also be employed, such as probes and primers that comprise at least 20, 25, 30, 40, 50, 60, 70, 80, 90, 100, or at least 150 consecutive nucleotides of the disclosed nucleic acid sequences. Probes and primers may be considerably longer than these examples, and it is understood that any length supported by the specification, including the tables, figures, and Sequence Listing, may be used.

[0104] Methods for preparing and using probes and primers are described in the references, for example Sambrook, J. et al. (1989) Molecular Cloning: A Laboratory Manual, 2^{nd} ed., vol. 1-3, Cold Spring Harbor Press, Plainview N.Y.; Ausubel, F. M. et al. (1987) Current Protocols in Molecular Biology. Greene Publ. Assoc. & Wiley-Intersciences, New York N.Y.; “ins, M. et al. (1990) PCR Protocols, A Guide to Methods and Applications, Academic Press, San Diego Calif. PCR primer pairs can be derived from a known sequence, for example, by using computer programs intended for that purpose such as Primer (Version 0.5, 1991, Whitehead Institute for Biomedical Research, Cambridge Mass.).

[0105] Oligonucleotides for use as primers are selected using software known in the art for such purpose. For example, OLIGO 4.06 software is useful for the selection of PCR primer pairs of up to 100 nucleotides each, and for the analysis of oligonucleotides and larger polynucleotides of up to 5,000 nucleotides from an input polynucleotide sequence of up to 32 kilobases. Similar primer selection programs have incorporated additional features for expanded capabilities. For example, the PrimOU primer selection program (available to the public from the Genome Center at University of Texas South West Medical Center, Dallas Tex.) is capable of choosing specific primers from megabase sequences and is thus useful for designing primers on a genome-wide scope. The Primer3 primer selection program (available to the public from the Whitehead Institute/MIT Center for Genome Research, Cambridge Mass.) allows the user to input a “mispriming library,” in which sequences to avoid as primer binding sites are user-specified. Primer3 is useful, in particular, for the selection of oligonucleotides for microarrays. (The source code for the latter two primer selection programs may also be obtained from their respective sources and modified to meet the user's specific needs.) The PrimeGen program (available to the public from the UK Human Genome Mapping Project Resource Centre, Cambridge UK) designs primers based on multiple sequence alignments, thereby allowing selection of primers that hybridize to either the most conserved or least conserved regions of aligned nucleic acid sequences. Hence, this program is useful for identification of both unique and conserved oligonucleotides and polynucleotide fragments. The oligonucleotides and polynucleotide fragments identified by any of the above selection methods are useful in hybridization technologies, for example, as PCR or sequencing primers, microarray elements, or specific probes to identify fully or partially complementary polynucleotides in a sample of nucleic acids. Methods of oligonucleotide selection are not limited to those described above.

[0106] A “recombinant nucleic acid” is a sequence that is not naturally occurring or has a sequence that is made by an artificial combination of two or more otherwise separated segments of sequence. This artificial combination is often accomplished by chemical synthesis or, more commonly, by the artificial manipulation of isolated segments of nucleic acids, e.g., by genetic engineering techniques such as those described in Sambrook, supra. The term recombinant includes nucleic acids that have been altered solely by addition, substitution, or deletion of a portion of the nucleic acid. Frequently, a recombinant nucleic acid may include a nucleic acid sequence operably linked to a promoter sequence. Such a recombinant nucleic acid may be part of a vector that is used, for example, to transform a cell.

[0107] Alternatively, such recombinant nucleic acids may be part of a viral vector, e.g., based on a vaccinia virus, that could be use to vaccinate a mammal wherein the recombinant nucleic acid is expressed, inducing a protective immunological response in the mammal.

[0108] A “regulatory element” refers to a nucleic acid sequence usually derived from untranslated regions of a gene and includes enhancers, promoters, introns, and 5′ and 3′ untranslated regions (UTRS). Regulatory elements interact with host or viral proteins which control transcription, translation, or RNA stability.

[0109] “Reporter molecules” are chemical or biochemical moieties used for labeling a nucleic acid, amino acid, or antibody. Reporter molecules include radionuclides; enzymes; fluorescent, chemiluminescent, or chromogenic agents; substrates; cofactors; inhibitors; magnetic particles; and other moieties known in the art.

[0110] An “RNA equivalent,” in reference to a DNA sequence, is composed of the same linear sequence of nucleotides as the reference DNA sequence with the exception that all occurrences of the nitrogenous base thyinine are replaced with uracil, and the sugar backbone is composed of ribose instead of deoxyribose.

[0111] The term “sample” is used in its broadest sense. A sample suspected of containing nucleic acids encoding TRFX, or fragments thereof, or TRFX itself, may comprise a bodily fluid; an extract from a cell, chromosome, organelle, or membrane isolated from a cell; a cell; genomic DNA, RNA, or cDNA, in solution or bound to a substrate; a tissue; a tissue print; etc.

[0112] The terms “specific binding” and “specifically binding” refer to that interaction between a protein or peptide and an agonist, an antibody, an antagonist, a small molecule, or any natural or synthetic binding composition. The interaction is dependent upon the presence of a particular structure of the protein, e.g., the antigenic determinant or epitope, recognized by the binding molecule. For example, if an antibody is specific for epitope “A,” the presence of a polypeptide comprising the epitope A, or the presence of free unlabeled A, in a reaction containing free labeled A and the antibody will reduce the amount of labeled A that binds to the antibody.

[0113] The term “substantially purified” refers to nucleic acid or amino acid sequences that are removed from their natural environment and are isolated or separated, and are at least 60% free, preferably at least 75% free, and most preferably at least 90% free from other components with which they are naturally associated.

[0114] A “substitution” refers to the replacement of one or more amino acid residues or nucleotides by different amino acid residues or nucleotides, respectively.

[0115] “Substrate” refers to any suitable rigid or semi-rigid support including membranes, filters, chips, slides, wafers, fibers, magnetic or nonmagnetic beads, gels, tubing, plates, polymers, microparticles and capillaries. The substrate can have a variety of surface forms, such as wells, trenches, pins, channels and pores, to which polynucleotides or polypeptides are bound.

[0116] A “transcript image” refers to the collective pattern of gene expression by a particular cell type or tissue under given conditions at a given time.

[0117] “Transformation” describes a process by which exogenous DNA is introduced into a recipient cell. Transformation may occur under natural or artificial conditions according to various methods well known in the art, and may rely on any known method for the insertion of foreign nucleic acid sequences into a prokaryotic or eukaryotic host cell. The method for transformation is selected based on the type of host cell being transformed and may include, but is not limited to, bacteriophage or viral infection, electroporation, heat shock lipofection, and particle bombardment. The term “transformed” cells includes stably transformed cells in which the inserted DNA is capable of replication either as an autonomously replicating plasmid or as part of the host chromosome, as well as transiently transformed cells which express the inserted DNA or RNA for limited periods of time.

[0118] A “transgenic organism,” as used herein, is any organism, including but not limited to animals and plants, in which one or more of the cells of the organism contains heterologous nucleic acid introduced by way of human intervention, such as by transgenic techniques well known in the art. The nucleic acid is introduced into the cell, directly or indirectly by introduction into a precursor of the cell, by way of deliberate genetic manipulation, such as by microinjection or by infection with a recombinant virus. The term genetic manipulation does not include classical cross-breeding, or in vitro fertilization, but rather is directed to the introduction of a recombinant DNA molecule. The transgenic organisms contemplated in accordance with the present invention include bacteria, cyanobacteria, fungi, plants, and animals. The isolated DNA of the present invention can be introduced into the host by methods known in the art, for example infection, transfection, transformation or transconjugation. Techniques for transferring the DNA of the present invention into such organisms are widely known and provided in references such as Sambrook, J. et al. (1989), supra.

[0119] A “variant” of a particular nucleic acid sequence is defined as a nucleic acid sequence having at least 40% sequence identity to the particular nucleic acid sequence over a certain length of one of the nucleic acid sequences using blastn with the “BLAST 2 Sequences” tool Version 2.0.9 (May 7, 1999) set at default parameters. Such a pair of nucleic acids may show, for example, at least 50%, at least 60%, at least 70%, at least 80%, at least 85%, at least 90%, at least 95% or at least 98% or greater sequence identity over a certain defined length. A variant may be described as, for example, an “allelic” (as defined above), “splice,” “species,” or “polymorphic” variant. A splice variant may have significant identity to a reference molecule, but will generally have a greater or lesser number of polynucleotides due to alternative splicing of exons during mRNA processing. The corresponding polypeptide may possess additional functional domains or lack domains that are present in the reference molecule. Species variants are polynucleotide sequences that vary from one species to another. The resulting polypeptides generally will have significant amino acid identity relative to each other. A polymorphic variant is a variation in the polynucleotide sequence of a particular gene between individuals of a given species. Polymorphic variants also may encompass “single nucleotide polymorphisms” (SNPs) in which the polynucleotide sequence varies by one nucleotide base. The presence of SNPs may be indicative of, for example, a certain population, a disease state, or a propensity for a disease state.

[0120] A “variant” of a particular polypeptide sequence is defined as a polypeptide sequence having at least 40% sequence identity to the particular polypeptide sequence over a certain length of one of the polypeptide sequences using blastp with the “BLAST 2 Sequences” tool Version 2.0.9 (May 7, 1999) set at default parameters. Such a pair of polypeptides may show, for example, at least 50%, at least 60%, at least 70%, at least 80%, at least 90%, at least 95%, or at least 98% or greater sequence identity over a certain defined length of one of the polypeptides.

[0121] The Invention

[0122] The invention is based on the discovery of new human transcription factors (TRFX), the polynucleotides encoding TRFX, and the use of these compositions for the diagnosis, treatrnent, or prevention of cell proliferative, autoimmune/inflanmnatory, neurological, and developmental disorders.

[0123] Table 1 lists the Incyte clones used to assemble full length nucleotide sequences encoding TRFX. Columns 1 and 2 show the sequence identification numbers (SEQ ID NOs) of the polypeptide and nucleotide sequences, respectively. Column 3 shows the clone IDs of the Incyte clones in which nucleic acids encoding each TRFX were identified, and column 4 shows the cDNA libraries from which these clones were isolated. Column 5 shows Incyte clones and their corresponding cDNA libraries. Clones for which cDNA libraries are not indicated were derived from pooled cDNA libraries. In some cases, GenBank sequence identifiers are also shown in column 5. The Incyte clones and GenBank cDNA sequences, where indicated, in column 5 were used to assemble the consensus nucleotide sequence of each TRFX and are useful as fragments in hybridization technologies.

[0124] The columns of Table 2 show various properties of each of the polypeptides of the invention: column 1 references the SEQ ID NO and Incyte clone ID of each polypeptide; column 2 shows the number of amino acid residues in each polypeptide; column 3 shows potential phosphorylation sites; column 4 shows potential glycosylation sites; column 5 shows the amino acid residues comprising signature sequences and motifs; column 6 shows homologous sequences as identified by BLAST analysis along with relevant citations, all of which are expressly incorporated by reference herein in their entirety; and column 7 shows analytical methods and in some cases, searchable databases to which the analytical methods were applied. The methods of column 7 were used to characterize each polypeptide through sequence homology and protein motifs.

[0125] The columns of Table 3 show the tissue-specificity and diseases, disorders, or conditions associated with nucleotide sequences encoding TRFX. The first column of Table 3 lists the nucleotide SEQ ID NOs and Incyte Clone IDs. Fragments of these polynucleotides are useful, for example, in hybridization or amplification technologies to identify SEQ ID NO:108-214 and to distinguish between SEQ ID NO:108-214 and related polynucleotide sequences. The polypeptides encoded by these fragments are useful, for example, as immunogenic peptides. Column 2 lists tissue categories which express TRFX as a fraction of total tissues expressing TRFX. Column 3 lists diseases, disorders, or conditions associated with those tissues expressing TRFX as a fraction of total tissues expressing TRFX. Column 4 lists the vectors used to subclone each cDNA library.

[0126] The columns of Table 4 show descriptions of the tissues used to construct the cDNA libraries from which cDNA clones encoding TRFX were isolated. Column 1 references the nucleotide SEQ ID NOs and Incyte Clone IDs, column 2 shows the cDNA libraries from which these clones were isolated, and column 3 shows the tissue origins and other descriptive information relevant to the cDNA libraries in column 2.

[0127] SEQ ID NO:111 maps to chromosome 6 within the interval from 89.4 to 96.1 centiMorgans.

[0128] SEQ ID NO:114 maps to chromosome 6 within the interval from 42.0 to 44.9 centiMorgans.

[0129] SEQ ID NO:117 maps to chromosome 13 within the interval from 95.9 to 112.7 centiMorgans.

[0130] SEQ ID NO:122 maps to chromosome 3 within the interval from 55.4 to 63.3 centiMorgans.

[0131] SEQ ID NO:123 maps to chromosome 7 within the interval from 149.6 to 159.0 centiMorgans.

[0132] SEQ ID NO:125 maps to chromosome 15 within the interval from 45.5 to 58.8 centiMorgans.

[0133] SEQ ID NO:130 maps to chromosome 1 within the interval from 152.2 to 156.1 centiMorgans.

[0134] SEQ ID NO:132 maps to chromosome 1 within the interval from 36.2 to 54.2 centiMorgans.

[0135] SEQ ID NO:133 maps to chromosome 19 within the interval from 41.7 to 49.4 centiMorgans.

[0136] SEQ ID NO:134 maps to chromosome 17 within the interval from 99.3 to 104.7 centiMorgans.

[0137] SEQ ID NO:136 maps to chromosome 16 within the interval from 119.2 centiMorgans to the q-terminus.

[0138] SEQ ID NO:138 maps to chromosome 19 within the interval from 60.9 to 61.4 centiMorgans.

[0139] SEQ ID NO:145 maps to chromosome 2 within the interval from 190.8 to 196.8 centiMorgans and to chromosome 10 within the interval from 68.7 to 72.5 centiMorgans.

[0140] SEQ ID NO:149 maps to chromosome 3 within the interval from the p terminus to 16.5 centiMorgans.

[0141] SEQ ID NO:152 maps to chromosome 19 within the interval from 35.5 to 49.4 centiMorgans and to chromosome 7 within the interval from 100.5 to 114.5 centiMorgans and to chromosome 7 within the intervals from 67.6 to 69.3 centiMorgans and 83.8 centiMorgans and the q-terminus.

[0142] SEQ ID NO:153 maps to chromosome 16 within the interval from 65.6 to 72.6 centiMorgans.

[0143] SEQ ID NO:156 maps to chromosome 20 within the interval from 65.5 to 79.0 centiMorgans.

[0144] SEQ ID NO:159 maps to chromosome 18 within the interval from 40.4 to 49.7 centiMorgans.

[0145] SEQ ID NO:168 maps to chromosome 23 within the interval from 112.8 to 139.4 centiMorgans.

[0146] SEQ ID NO:179 maps to chromosome 11 within the interval from 16.7 to 24.7 centiMorgans.

[0147] SEQ ID NO:180 maps to chromosome 16 within the interval from 33.3 to 42.7 centiMorgans

[0148] SEQ ID NO:184 maps to chromosome 2 within the interval from 190.5 to 196.8 centiMorgans and within the interval from the p terminus to 16.4 centiMorgans.

[0149] SEQ ID NO:185 maps to chromosome 9 within the interval from 20.4 to 27.8 centiMorgans and from the p terminus to 33.3 centiMorgans.

[0150] SEQ ID NO:196 maps to chromosome 1 within the interval from 57.2 to 57.5 centiMorgans.

[0151] SEQ ID NO:197 maps to chromosome 19 within the interval from 60.9 to 61.4 centiMorgans.

[0152] SEQ ID NO:199 maps to chromosome 13 within the interval from 77.1 to 86.9 centiMorgans and to chromosome 2 within the interval from 51.2 to 51.8 centiMorgans.

[0153] SEQ ID NO:201 maps to chromosome 22 within the interval from 22.2 to 40.2 centiMorgans.

[0154] SEQ ID NO:204 maps to chromosome 5 within the interval from 132.8 to 141.4 centiMorgans.

[0155] SEQ ID NO:208 maps to chromosome 13 within the interval from 37.3 to 45.8 centiMorgans and to chromosome 19 within the interval from 58.1 to 58.7 centiMorgans.

[0156] SEQ ID NO:212 maps to chromosome 19 within the interval from the p terminus to 35.5 centiMorgans and to chromosome 20 within the interval from 50.2 to 53.6.

[0157] SEQ ID NO:213 maps to chromosome 6 within the interval from the p terminus to 14.2 centiMorgans.

[0158] The invention also encompasses TRFX variants. A preferred TRFX variant is one which has at least about 80%, or alternatively at least about 90%, or even at least about 95% amino acid sequence identity to the TRFX amino acid sequence, and which contains at least one functional or structural characteristic of TRFX.

[0159] The invention also encompasses polynucleotides which encode TRFX. In a particular embodiment, the invention encompasses a polynucleotide sequence comprising a sequence selected from the group consisting of SEQ ID NO:108-214, which encodes TRFX. The polynucleotide sequences of SEQ ID NO:108-214, as presented in the Sequence Listing, embrace the equivalent RNA sequences, wherein occurrences of the nitrogenous base thymine are replaced with uracil, and the sugar backbone is composed of ribose instead of deoxyribose.

[0160] The invention also encompasses a variant of a polynucleotide sequence encoding TRFX. In particular, such a variant polynucleotide sequence will have at least about 70%, or alternatively at least about 85%, or even at least about 95% polynucleotide sequence identity to the polynucleotide sequence encoding TRFX. A particular aspect of the invention encompasses a variant of a polynucleotide sequence comprising a sequence selected from the group consisting of SEQ ID NO:108-214 which has at least about 70%, or alternatively at least about 85%, or even at least about 95% polynucleotide sequence identity to a nucleic acid sequence selected from the group consisting of SEQ ID NO:108-214. Any one of the polynucleotide variants described above can encode an amino acid sequence which contains at least one functional or structural characteristic of TRFX.

[0161] It will be appreciated by those skilled in the art that as a result of the degeneracy of the genetic code, a multitude of polynucleotide sequences encoding TRFX, some bearing minimal similarity to the polynucleotide sequences of any known and naturally occurring gene, may be produced. Thus, the invention contemplates each and every possible variation of polynucleotide sequence that could be made by selecting combinations based on possible codon choices. These combinations are made in accordance with the standard triplet genetic code as applied to the polynucleotide sequence of naturally occurring TRFX, and all such variations are to be considered as being specifically disclosed.

[0162] Although nucleotide sequences which encode TRFX and its variants are generally capable of hybridizing to the nucleotide sequence of the naturally occurring TRFX under appropriately selected conditions of stringency, it may be advantageous to produce nucleotide sequences encoding TRFX or its derivatives possessing a substantially different codon usage, e.g., inclusion of non-naturally occurring codons. Codons may be selected to increase the rate at which expression of the peptide occurs in a particular prokaryotic or eukaryotic host in accordance with the frequency with which particular codons are utilized by the host. Other reasons for substantially altering the nucleotide sequence encoding TRFX and its derivatives without altering the encoded amino acid sequences include the production of RNA transcripts having more desirable properties, such as a greater half-life, than transcripts produced from the naturally occurring sequence.

[0163] The invention also encompasses production of DNA sequences which encode TRFX and TRFX derivatives, or fragments thereof, entirely by synthetic chemistry. After production, the synthetic sequence may be inserted into any of the many available expression vectors and cell systems using reagents well known in the art. Moreover, synthetic chemistry may be used to introduce mutations into a sequence encoding TRFX or any fragment thereof.

[0164] Also encompassed by the invention are polynucleotide sequences that are capable of hybridizing to the claimed polynucleotide sequences, and, in particular, to those shown in SEQ ID NO:108-214 and fragments thereof under various conditions of stringency. (See, e.g., Wahl, G. M. and S. L. Berger (1987) Methods Enzymol. 152:399407; Kimmel, A. R. (1987) Methods Enzymol. 152:507-511.) Hybridization conditions, including annealing and wash conditions, are described in “Definitions.”

[0165] Methods for DNA sequencing are well known in the art and may be used to practice any of the embodiments of the invention. The methods may employ such enzymes as the Klenow fragment of DNA polymerase I, SEQUENASE (US Biochemical, Cleveland Ohio), Taq polymerase (Applied Biosystems, Foster City Calif.), thermostable T7 polymerase (Amersham Pharmacia Biotech, Piscataway N.J.), or combinations of polymerases and proofreading exonucleases such as those found in the ELONGASE amplification system (Life Technologies, Gaithersburg Md.). Preferably, sequence preparation is automated with machines such as the MICROLAB 2200 liquid transfer system (Hamilton, Reno Nev.), PTC200 thermal cycler (MJ Research, Watertown Mass.) and ABI CATALYST 800 thermal cycler (Applied Biosystems). Sequencing is then carried out using either the ABI 373 or 377 DNA sequencing system (Applied Biosystems), the MEGABACE 1000 DNA sequencing system (Molecular Dynamics, Sunnyvale Calif.), or other systems known in the art. The resulting sequences are analyzed using a variety of algorithms which are well known in the art. (See, e.g., Ausubel, F. M. (1997) Short Protocols in Molecular Biology, John Wiley & Sons, New York N.Y., unit 7.7; Meyers, R. A. (1995) Molecular Biology and Biotechnology, Wiley VCH, New York N.Y., pp. 856-853.)

[0166] The nucleic acid sequences encoding TRFX may be extended utilizing a partial-nucleotide sequence and employing various PCR-based methods known in the art to detect upstream sequences, such as promoters and regulatory elements. For example, one method which may be employed, restriction-site PCR, uses universal and nested primers to amplify unknown sequence from genomic DNA within a cloning vector. (See, e.g., Sarkar, G. (1993) PCR Methods Applic. 2:318-322.) Another method, inverse PCR, uses primers that extend in divergent directions to amplify unknown sequence from a circularized template. The template is derived from restriction fragments comprising a known genomic locus and surrounding sequences. (See, e.g., Triglia, T. et al. (1988) Nucleic Acids Res. 16:8186.) A third method, capture PCR, involves PCR amplification of DNA fragments adjacent to known sequences in human and yeast artificial chromosome DNA. (See, e.g., Lagerstrom, M. et al. (1991) PCR Methods Applic. 1: 111-119.) In this method, multiple restriction enzyme digestions and ligations may be used to insert an engineered double-stranded sequence into a region of unknown sequence before performing PCR. Other methods which may be used to retrieve unknown sequences are known in the art. (See, e.g., Parker, J. D. et al. (1991) Nucleic Acids Res. 19:3055-3060). Additionally, one may use PCR, nested primers, and PROMOTERFINDER libraries (Clontech, Palo Alto Calif.) to walk genomic DNA. This procedure avoids the need to screen libraries and is useful in finding intron/exon junctions. For all PCR-based methods, primers may be designed using commercially available software, such as OLIGO 4.06 Primer Analysis software (National Biosciences, Plymouth Minn.) or another appropriate program, to be about 22 to 30 nucleotides in length, to have a GC content of about 50% or more, and to anneal to the template at temperatures of about 68° C. to 72° C.

[0167] When screening for full-length cDNAs, it is preferable to use libraries that have been size-selected to include larger cDNAs. In addition, random-primed libraries, which often include sequences containing the 5′ regions of genes, are preferable for situations in which an oligo d(T) library does not yield a full-length cDNA. Genomic libraries may be useful for extension of sequence into 5′ non-transcribed regulatory regions.

[0168] Capillary electrophoresis systems which are commercially available may be used to analyze the size or confirm the nucleotide sequence of sequencing or PCR products. In particular, capillary sequencing may employ flowable polymers for electrophoretic separation, four different nucleotide-specific, laser-stimulated fluorescent dyes, and a charge coupled device camera for detection of the emitted wavelengths. Output/light intensity may be converted to electrical signal using appropriate software (e.g., GENOTYPER and SEQUENCE NAVIGATOR, Applied Biosystems), and the entire process from loading of samples to computer analysis and electronic data display may be computer controlled. Capillary electrophoresis is especially preferable for sequencing small DNA fragments which may be present in limited amounts in a particular sample.

[0169] In another embodiment of the invention, polynucleotide sequences or fragments thereof which encode TRFX may be cloned in recombinant DNA molecules that direct expression of TRFX, or fragments or functional equivalents thereof, in appropriate host cells. Due to the inherent degeneracy of the genetic code, other DNA sequences which encode substantially the same or a functionally equivalent amino acid sequence may be produced and used to express TRFX.

[0170] The nucleotide sequences of the present invention can be engineered using methods generally known in the art in order to alter TRFX-encoding sequences for a variety of purposes including, but not limited to, modification of the cloning, processing, and/or expression of the gene product. DNA shuffling by random fragmentation and PCR reassembly of gene fragments and synthetic oligonucleotides may be used to engineer the nucleotide sequences. For example, oligonucleotide-mediated site-directed mutagenesis may be used to introduce mutations that create new restriction sites, alter glycosylation patterns, change codon preference, produce splice variants, and so forth.

[0171] The nucleotides of the present invention may be subjected to DNA shuffling techniques such as MOLECULARBREEDING (Maxygen Inc., Santa Clara Calif.; described in U.S. Pat. No. 5,837,458; Chang, C.-C. et al. (1999) Nat. Biotechnol. 17:793-797; Christians, P. C. et al. (1999) Nat. Biotechnol. 17:259-264; and Crameri, A. et al. (1996) Nat. Biotechnol. 14:315-319) to alter or improve the biological properties of TRFX, such as its biological or enzymatic activity or its ability to bind to other molecules or compounds. DNA shuffling is a process by which a library of gene variants is produced using PCR-mediated recombination of gene fragments. The library is then subjected to selection or screening procedures that identify those gene variants with the desired properties. These preferred variants may then be pooled and further subjected to recursive rounds of DNA shuffling and selection/screening. Thus, genetic diversity is created through “artificial” breeding and rapid molecular evolution. For example, fragments of a single gene containing random point mutations may be recombined, screened, and then reshuffled until the desired properties are optimized. Alternatively, fragments of a given gene may be recombined with fragments of homologous genes in the same gene family, either from the same or different species, thereby maximizing the genetic diversity of multiple naturally occurring genes in a directed and controllable manner.

[0172] In another embodiment, sequences encoding TRFX may be synthesized, in whole or in part, using chemical methods well known in the art. (See, e.g., Caruthers, M. H. et al. (1980) Nucleic Acids Symp. Ser. 7:215-223; Horn, T. et al. (1980) Nucleic Acids Symp. Ser. 7:225-232.) Alternatively, TRFX itself or a fragment thereof may be synthesized using chemical methods. For example, peptide synthesis can be performed using various solution-phase or solid-phase techniques. (See, e.g., Creighton, T. (1984) Proteins, Structures and Molecular Properties, W H Freeman, New York N.Y., pp. 55-60; and Roberge, J. Y. et al. (1995) Science 269:202-204.) Automated synthesis may be achieved using the ABI 431A peptide synthesizer (Applied Biosystems). Additionally, the amino acid sequence of TRFX, or any part thereof, may be altered during direct synthesis and/or combined with sequences from other proteins, or any part thereof, to produce a variant polypeptide or a polypeptide having a sequence of a naturally occurring polypeptide.

[0173] The peptide may be substantially purified by preparative high performance liquid chromatography. (See, e.g., Chiez, R. M. and F. Z. Regnier (1990) Methods Enzymol. 182:392-421.) The composition of the synthetic peptides may be confirmed by amino acid analysis or by sequencing. (See, e.g., Creighton, supra, pp. 28-53.)

[0174] In order to express a biologically active TRFX, the nucleotide sequences encoding TRFX or derivatives thereof may be inserted into an appropriate expression vector, i.e., a vector which contains the necessary elements for transcriptional and translational control of the inserted coding sequence in a suitable host. These elements include regulatory sequences, such as enhancers, constitutive and inducible promoters, and 5′ and 3′ untranslated regions in the vector and in polynucleotide sequences encoding TRFX. Such elements may vary in their strength and specificity. Specific initiation signals may also be used to achieve more efficient translation of sequences encoding TRFX. Such signals include the ATG initiation codon and adjacent sequences, e.g. the Kozak sequence. In cases where sequences encoding TRFX and its initiation codon and upstream regulatory sequences are inserted into the appropriate expression vector, no additional transcriptional or translational control signals may be needed. However, in cases where only coding sequence, or a fragment thereof, is inserted, exogenous translational control signals including an in-frame ATG initiation codon should be provided by the vector. Exogenous translational elements and initiation codons may be of various origins, both natural and synthetic. The efficiency of expression may be enhanced by the inclusion of enhancers appropriate for the particular host cell system used. (See, e.g., Scharf, D. et al. (1994) Results Probl. Cell Differ. 20:125-162.)

[0175] Methods which are well known to those skilled in the art may be used to construct expression vectors containing sequences encoding TRFX and appropriate transcriptional and translational control elements. These methods include in vitro recombinant DNA techniques, synthetic techniques, and in vivo genetic recombination. (See, e.g., Sambrook, J. et al. (1989) Molecular Cloning, A Laboratory Manual, Cold Spring Harbor Press, Plainview N.Y., ch. 4, 8, and 16-17; Ausubel, F. M. et al. (1995) Current Protocols in Molecular Biology, John Wiley & Sons, New York N.Y., ch. 9, 13, and 16.)

[0176] A variety of expression vector/host systems may be utilized to contain and express sequences encoding TRFX. These include, but are not limited to, microorganisms such as bacteria transformed with recombinant bacteriophage, plasmid, or cosmid DNA expression vectors; yeast transformed with yeast expression vectors; insect cell systems infected with viral expression vectors (e.g., baculovirus); plant cell systems transformed with viral expression vectors (e.g., cauliflower mosaic virus, CaMV, or tobacco mosaic virus, TMV) or with bacterial expression vectors (e.g., Ti or pBR322 plasmids); or animal cell systems. (See, e.g., Sambrook, sulpra; Ausubel, supra; Van Heeke, G. and S. M. Schuster (1989) J. Biol. Chem. 264:5503-5509; Bitter, G. A. et al. (1987) Methods Enzymol. 153:516-544; Scorer, Calif. et al. (1994) Bio/Technology 12:181-184; Engelhard, E. K. et al. (1994) Proc. Nat. Acad. Sci. USA 91:3224-3227; Sandig, V. et al. (1996) Hum. Gene Ther. 7:1937-1945; Takamatsu, N. (1987) EMBO J. 6:307-311; Coruzzi, G. et al. (1984) EMBO J. 3:1671-1680; Broglie, R. et al. (1984) Science 224:838-843; Winter, J. et al. (1991) Results Probl. Cell Differ. 17:85-105; The McGraw Hill Yearbook of Science and Technology (1992) McGraw Hill, New York N.Y., pp. 191-196; Logan, J. and T. Shenk (1984) Proc. Natl. Acad. Sci. USA 81:3655-3659; and Harrington, J. J. et al. (1997) Nat. Genet. 15:345-355.) Expression vectors derived from retroviruses, adenoviruses, or herpes or vaccinia viruses, or from various bacterial plasmids, may be used for delivery of nucleotide sequences to the targeted organ, tissue, or cell population. (See, e.g., Di Nicola, M. et al. (1998) Cancer Gen. Ther. 5(6):350356; Yu, M. et al. (1993) Proc. Natl. Acad. Sci. USA 90(13):6340-6344; Buller, R. M. et al. (1985) Nature 317(6040):813-815; McGregor, D. P. et al. (1994) Mol. Immunol. 31(3):219-226; and Verma, I. M. and N. Somia (1997) Nature 389:239-242.) The invention is not limited by the host cell employed.

[0177] In bacterial systems, a number of cloning and expression vectors may be selected depending upon the use intended for polynucleotide sequences encoding TRFX. For example, routine cloning, subcloning, and propagation of polynucleotide sequences encoding TRFX can be achieved using a multifunctional E. coli vector such as PBLUESCRIPT (Stratagene, La Jolla Calif.) or PSPORT1 plasmid (Life Technologies). Ligation of sequences encoding TRFX into the vector's multiple cloning site disrupts the lacZ gene, allowing a calorimetric screening procedure for identification of transformed bacteria containing recombinant molecules. In addition, these vectors may be useful for in vitro transcription, dideoxy sequencing, single strand rescue with helper phage, and creation of nested deletions in the cloned sequence. (See, e.g., Van Heeke, G. and S. M. Schuster (1989) J. Biol. Chem. 264:5503-5509.) When large quantities of TRFX are needed, e.g. for the production of antibodies, vectors which direct high level expression of TRFX may be used. For example, vectors containing the strong, inducible T5 or T7 bacteriophage promoter may be used.

[0178] Yeast expression systems may be used for production of TRFX. A number of vectors containing constitutive or inducible promoters, such as alpha factor, alcohol oxidase, and PGH promoters, may be used in the yeast Saccharomyces cerevisiae or Pichia pastoris. In addition, such vectors direct either the secretion or intracellular retention of expressed proteins and enable integration of foreign sequences into the host genome for stable propagation. (See, e.g., Ausubel, 1995, surra; Bitter, supra; and Scorer, supra.)

[0179] Plant systems may also be used for expression of TRFX. Transcription of sequences encoding TRFX may be driven viral promoters, e.g., the 35S and 19S promoters of CaMV used alone or in combination with the omega leader sequence from TMV (Takamatsu, N. (1987) EMBO J. 6:307-311). Alternatively, plant promoters such as the small subunit of RUBISCO or heat shock promoters may be used. (See, e.g., Conizzi, supra; Broglie, supra; and Winter, supra.) These constructs can be introduced into plant ceus by direct DNA transformation or pathogen-mediated transfection. (See, e.g., The McGraw Hill Yearbook of Science and Technology (1992) McGraw Hill, New York N.Y., pp. 191-196.)

[0180] In mammalian cells, a number of viral-based expression systems may be utilized. In cases where an adenovirus is used as an expression vector, sequences encoding TRFX may be ligated into an adenovirus transcription/translation complex consisting of the late promoter and tripartite leader sequence. Insertion in a non-essential E1 or E3 region of the viral genome may be used to obtain infective virus which expresses TRFX in host cells. (See, e.g., Logan, J. and T. Shenk (1984) Proc. Natl. Acad. Sci. USA 81:3655-3659.) In addition, transcription enhancers, such as the Rous sarcoma virus (RSV) enhancer, may be used to increase expression in mammalian host cells. SV40 or EBV-based vectors may also be used for high-level protein expression.

[0181] Human artificial chromosomes (HACs) may also be employed to deliver larger fragments of DNA than can be contained in and expressed from a plasmid. HACs of about 6 kb to 10 Mb are constructed and delivered via conventional delivery methods (liposomes, polycationic amino polymers, or vesicles) for therapeutic purposes. (See, e.g., Harrington, J. J. et al. (1997) Nat. Genet. 15:345-355.)

[0182] For long term production of recombinant proteins in mammalian systems, stable expression of TRRX in cell lines is preferred. For example, sequences encoding TRFX can be transformed into cell lines using expression vectors which may contain viral origins of replication and/or endogenous expression elements and a selectable marker gene on the same or on a separate vector. Following the introduction of the vector, cells may be allowed to grow for about 1 to 2 days in enriched media before being switched to selective media The purpose of the selectable marker is to confer resistance to a selective agent, and its presence allows growth and recovery of cells which successfully express the introduced sequences. Resistant clones of stably transformed cells may be propagated using tissue culture techniques appropriate to the cell type.

[0183] Any number of selection systems may be used to recover transformed cell lines. These include, but are not limited to, the herpes simplex virus thymidine kinase and adenine phosphoribosyltransferase genes, for use in tk⁻ and apr⁻ cells, respectively. (See, e.g., Wigler, M. et al. (1977) Cell 11:223-232; Lowy, I. et al. (1980) Cell 22:817-823.) Also, antimetabolite, antibiotic, or herbicide resistance can be used as the basis for selection. For example, dhfr confers resistance to methotrexate; neo confers resistance to the aminoglycosides neomycin and G-418; and als and pat confer resistance to chlorsulflron and phosphinotricin acetyltransferase, respectively. (See, e.g., Wigler, M. et al. (1980) Proc. Natl. Acad. Sci. USA 77:3567-3570; Colbere-Garapin, F. et al. (1981) J. Mol. Biol. 150:1-14.) Additional selectable genes have been described, e.g., trpb and hisD, which alter cellular requirements for metabolites. (See, e.g., Hartan, S. C. and R. C. Mulligan (1988) Proc. Natl. Acad. Sci. USA 85:8047-8051.) Visible markers, e.g., anthocyanins, green fluorescent proteins (GFP; Clontech), β glucuronidase and its substrate β-glucuronide, or luciferase and its substrate luciferin may be used. These markers can be used not only to identify transformants, but also to quantify the amount of transient or stable protein expression attributable to a specific vector system. (See, e.g., Rhodes, C. A. (1995) Methods Mol. Biol. 55:121-131.)

[0184] Although the presence/absence of marker gene expression suggests that the gene of interest is also present, the presence and expression of the gene may need to be confirmed. For example, if the sequence encoding TRFX is inserted within a marker gene sequence, transformed cells containing sequences encoding TRFX can be identified by the absence of marker gene function. Alternatively, a marker gene can be placed in tandem with a sequence encoding TRFX under the control of a single promoter. Expression of the marker gene in response to induction or selection usually indicates expression of the tandem gene as well.

[0185] In general, host cells that contain the nucleic acid sequence encoding TRFX and that express TRFX may be identified by a variety of procedures known to those of skill in the art. These procedures include, but are not limited to, DNA-DNA or DNA-RNA hybridizations, PCR amplification, and protein bioassay or immunoassay techniques which include membrane, solution, or chip based technologies for the detection and/or quantification of nucleic acid or protein sequences.

[0186] Immunological methods for detecting and measuring the expression of TRFX using either specific polyclonal or monoclonal antibodies are known in the art. Examples of such techniques include enzyme-linked irmnunosorbent assays (ELISAs), radioimmunoassays (RIAs), and fluorescence activated cell sorting (FACS). A two-site, monoclonal-based immunoassay utilizing monoclonal antibodies reactive to two non-interferi itopes on TRFX is preferred, but a competitive binding assay may be employed. These and other assays are well known in the art. (See, e.g., Hampton, R. et al. (1990) Serological Methods, a Laboratory Manual, APS Press, St. Paul Minn., Sect. IV; Coligan, J. E. et al. (1997) Current Protocols in Immunology, Greene Pub. Associates and Wiley-Interscience, New York N.Y.; and Pound, J. D. (1998) Immunochemical Protocols, Humana Press, Totowa N.J.)

[0187] A wide variety of labels and conjugation techniques are known by those skilled in the art and may be used in various nucleic acid and amino acid assays. Means for producing labeled hybridization or PCR probes for detecting sequences related to polynucleotides encoding TRFX include oligolabeling, nick translation, end-labeling, or PCR amplification using a labeled nucleotide. Alternatively, the sequences encoding TRFX, or any fragments thereof, may be cloned into a vector for the production of an mRNA probe. Such vectors are known in the art, are commercially available, and may be used to synthesize RNA probes in vitro by addition of an appropriate RNA polymerase such as T7, T3, or SP6 and labeled nucleotides. These procedures may be conducted using a variety of commercially available kits, such as those provided by Amersham Pharmacia Biotech, Promega (Madison Wis.), and US Biochemical. Suitable reporter molecules or labels which may be used for ease of detection include radionuclides, enzymes, fluorescent, chemiluminescent, or chromogenic agents, as well as substrates, cofactors, inhibitors, magnetic particles, and the like.

[0188] Host cells transformed with nucleotide sequences encoding TRFX may be cultured under conditions suitable for the expression and recovery of the protein from cell culture. The protein produced by a transformed cell may be secreted or retained intracellularly depending on the sequence and/or the vector used. As will be understood by those of skill in the art, expression vectors containing polynucleotides which encode TRFX may be designed to contain signal sequences which direct secretion of TRFX through a prokaryotic or eukaryotic cell membrane.

[0189] In addition, a host cell strain may be chosen for its ability to modulate expression of the inserted sequences or to process the expressed protein in the desired fashion. Such modifications of the polypeptide include, but are not limited to, acetylation, carboxylation, glycosylation, phosphorylation, lipidation, and acylation. Post-translational processing which cleaves a “prepro” or “pro” form of the protein may also be used to specify protein targeting, folding, and/or activity. Different host cells which have specific cellular machinery and characteristic mechanisms for post-translational activities (e.g., CHO, HeLa, MDCK, HEK293, and WI38) are available from the American Type Culture Collection (ATCC, Manassas Va.) and may be chosen to ensure the correct modification and processing of the foreign protein.

[0190] In another embodiment of the invention, natural, modified, or recombinant nucleic acid sequences encoding TRFX may be ligated to a heterologous sequence resulting in translation of a fusion protein in any of the aforementioned host systems. For example, a chimeric TRFX protein containing a heterologous moiety that can be recognized by a commercially available antibody may facilitate the screening of peptide libraries for inhibitors of TRFX activity. Heterologous protein and peptide moieties may also facilitate purification of fusion proteins using commercially available affinity matrices. Such moieties include, but are not limited to, glutathione S-transferase (GST), maltose binding protein (MBP), thioredoxin (Trx), calmodulin binding peptide (CBP), 6-His, FLAG, c-myc, and hemagglutinin (HA). GST, MBP, Trx, CBP, and 6-His enable purification of their cognate fusion proteins on immobilized glutathione, maltose, phenylarsine oxide, calmodulin, and metal-chelate resins, respectively. FLAG, c-myc, and hemagglutinin (HA) enable immunoaffinity purification of fusion proteins using commercially available monoclonal and polyclonal antibodies that specifically recognize these epitope tags. A fusion protein may also be engineered to contain a proteolytic cleavage site located between the TRFX encoding sequence and the heterologous protein sequence, so that TRFX may be cleaved away from the heterologous moiety following purification. Methods for fusion protein expression and purification are discussed in Ausubel (1995, supra, ch. 10). A variety of commercially available kits may also be used to facilitate expression and purification of fusion proteins.

[0191] In a further embodiment of the invention, synthesis of radiolabeled TRFX may be achieved in vitro using the TNT rabbit reticulocyte lysate or wheat germ extract system (Promega). These systems couple transcription and translation of protein-coding sequences operably associated with the T7, T3, or SP6 promoters. Translation takes place in the presence of a radiolabeled amino acid precursor, for example, ³⁵S-methionine.

[0192] TRFX of the present invention or fragments thereof may be used to screen for compounds that specifically bind to TRFX. At least one and up to a plurality of test compounds may be screened for specific binding to TRFX. Examples of test compounds include antibodies, oligonucleotides, proteins (e.g., receptors), or small molecules.

[0193] In one embodiment, the compound thus identified is closely related to the natural ligand of TRFX, e.g., a ligand or fragment thereof, a natural substrate, a structural or functional mimetic, or a natural binding partner. (See, e.g., Coligan, J. E. et al. (1991) Current Protocols in Immunology 1(2): Chapter 5.) Similarly, the compound can be closely related to the natural receptor to which TRFX binds, or to at least a fragment of the receptor, e.g., the ligand binding site. In either case, the compound can be rationally designed using known techniques. In one embodiment, screening for these compounds involves producing appropriate cells which express TRFX, either as a secreted protein or on the cell membrane. Preferred cells include cells from mammals, yeast, Drosophila, or E. coli. Cells expressing TRFX or cell membrane fractions which contain TRFX are then contacted with a test compound and binding, stimulation, or inhibition of activity of either TRFX or the compound is analyzed.

[0194] An assay may simply test binding of a test compound to the polypeptide, wherein binding is detected by a fluorophore, radioisotope, enzyme conjugate, or other detectable label. For example, the assay may comprise the steps of combining at least one test compound with TRFX, either in solution or affixed to a solid support, and detecting the binding of TRFX to the compound. Alternatively, the assay may detect or measure binding of a test compound in the presence of a labeled competitor. Additionally, the assay may be carried out using cell-free preparations, chemical libraries, or natural product mixtures, and the test compound(s) may be free in solution or affixed to a solid support.

[0195] TRFX of the present invention or fragments thereof may be used to screen for compounds that modulate the activity of TRFX. Such compounds may include agonists, antagonists, or partial or inverse agonists. In one embodiment, an assay is performed under conditions permissive for TRFX activity, wherein TRFX is combined with at least one test compound, and the activity of TRFX in the presence of a test compound is compared with the activity of TRFX in the absence of the test compound. A change in the activity of TRFX in the presence of the test compound is indicative of a compound that modulates the activity of TRFX. Alternatively, a test compound is combined with an in vitro or cell-free system comprising TRFX under conditions suitable for TRFX activity, and the assay is performed. In either of these assays, a test compound which modulates the activity of TRFX may do so indirectly and need not come in direct contact with the test compound. At least one and up to a plurality of test compounds may be screened.

[0196] In another embodiment, polynucleotides encoding TRFX or their mammalian homologs may be “knocked out” in an animal model system using homologous recombination in embryonic stem (ES) cells. Such techniques are well known in the art and are useful for the generation of animal models of human disease. (See, e.g., U.S. Pat. No. 5,175,383 and U.S. Pat. No. 5,767,337.) For example, mouse ES cells, such as the mouse 129/SvJ cell line, are derived from the early mouse embryo and grown in culture. The ES cells are transformed with a vector containing the gene of interest disrupted by a marker gene, e.g., the neomycin phosphotransferase gene (neo; Capecchi, M. R. (1989) Science 244:1288-1292). The vector integrates into the corresponding region of the host genome by homologous recombination. Alternatively, homologous recombination takes place using the Cre-loxP system to knockout a gene of interest in a tissue- or developmental stage-specific manner (Marth, J. D. (1996) Clin. Invest. 97:1999-2002; Wagner, K. U. et al. (1997) Nucleic Acids Res. 25:43234330). Transformed ES cells are identified and microinjected into mouse cell blastocysts such as those from the C57BL/6 mouse strain. The blastocysts are surgically transferred to pseudopregnant dams, and the resulting chimeric progeny are genotyped and bred to produce heterozygous or homozygous strains. Transgenic animals thus generated may be tested with potential therapeutic or toxic agents.

[0197] Polynucleotides encoding TRFX may also be manipulated in vitro in ES cells derived from human blastocysts. Human ES cells have the potential to differentiate into at least eight separate cell lineages including endoderm, mesoderm, and ectodermal cell types. These cell lineages differentiate into, for example, neural cells, hematopoietic lineages, and cardiomyocytes (Thomson, J. A. et al. (1998) Science 282:1145-1147).

[0198] Polynucleotides encoding TRFX can also be used to create “knockin” humanized animals (pigs) or transgenic animals (mice or rats) to model human disease. With knockin technology, a region of a polynucleotide encoding TRPX is injected into animal ES cells, and the injected sequence integrates into the animal cell genome. Transformed cells are injected into blastulae, and the blastulae are implanted as described above. Transgenic progeny or inbred lines are studied and treated with potential pharmaceutical agents to obtain information on treatment of a human disease. Alternatively, a mammal inbred to overexpress TRFX, e.g., by secreting TRFX in its milk, may also serve as a convenient source of that protein (Janne, J. et al. (1998) Biotechnol. Annu. Rev. 4:55-74).

[0199] Therapeutics

[0200] Chemical and structural similarity, e.g., in the context of sequences and motifs, exists between regions of TRFX and transcription factors. In addition, the expression of TRFX is closely associated with reproductive, nervous, and hematopoeitic/immune tissues. Therefore, TRFX appears to play a role in cell proliferative, autoimmune/inflammatory, neurological, and developmental disorders. In the treatment of disorders associated with increased TRFX expression or activity, it is desirable to decrease the expression or activity of TRFX. In the treatment of disorders associated with decreased TRFX expression or activity, it is desirable to increase the expression or activity of TRFX.

[0201] Therefore, in one embodiment, TRFX or a fragment or derivative thereof may be administered to a subject to treat or prevent a disorder associated with decreased expression or activity of TRFX. Examples of such disorders include, but are not limited to, a cell proliferative disorder such as actinic keratosis, arteriosclerosis, atherosclerosis, bursitis, cirrhosis, hepatitis, mixed connective tissue disease (MCTD), myelofibrosis, paroxysmal nocturnal hemoglobinuria, polycythemia vera, psoriasis, primary thrombocythemia, and cancers including adenocarcinoma, leukemia, lymphoma, melanoma, myeloma, sarcoma, teratocarcinoma, and, in particular, cancers of the adrenal gland, bladder, bone, bone marrow, brain, breast, cervix, gall bladder, ganglia, gastrointestinal tract, heart, kidney, liver, lung, muscle, ovary, pancreas, parathyroid, penis, prostate, salivary glands, skin, spleen, testis, thymus, thyroid, and uterus; an autoimmune/inflammatory disorder such as acquired immunodeficiency syndrome (AIDS), Addison's disease, adult respiratory distress syndrome, allergies, ankylosing spondylitis, amyloidosis, anemia, asthma, atherosclerosis, autoimmune hemolytic anemia, autoimmune thyroiditis, autoimmune polyendocrinopathy-candidiasis-ectodermal dystrophy (APECED), bronchitis, cholecystitis, contact dermatitis, Crohn's disease, atopic dermatitis, dermatomyositis, diabetes mellitus, emphysema, episodic lymphopenia with lymphocytotoxins, erythroblastosis fetalis, erythema nodosum, atrophic gastritis, glomerulonephritis, Goodpasture's syndrome, gout, Graves' disease, Hashimoto's thyroiditis, hypereosinophilia, irritable bowel syndrome, multiple sclerosis, myasthenia gravis, myocardial or pericardial inflammation, osteoarthritis, osteoporosis, pancreatitis, polymyositis, psoriasis, Reiter's syndrome, rheumatoid arthritis, scleroderma, Sjogren's syndrome, systemic anaphylaxis, systemic lupus erythematosus, systemic sclerosis, thrombocytopenic purpura, ulcerative colitis, uveitis, Werner syndrome, complications of cancer, hemodialysis, and extracorporeal circulation, viral, bacterial, fungal, parasitic, protozoal, and helminthic infections, and trauma; a neurological disorder such as epilepsy, ischemic cerebrovascular disease, stroke, cerebral neoplasms, Alzheimer's disease, Pick's disease, Huntington's disease, dementia, Parkinson's disease and other extrapyramidal disorders, amyotrophic lateral sclerosis and other motor neuron disorders, progressive neural muscular atrophy, retinitis pigmentosa, hereditary ataxias, multiple sclerosis and other demyelinating diseases, bacterial and viral meningitis, brain abscess, subdural empyema, epidural abscess, suppurative intracranial thrombophlebitis, myelitis and radiculitis, viral central nervous system disease, prion diseases including kuru, Creutzfeldt-Jakob disease, and Gerstmann-Straussler-Scheinker syndrome, fatal familial insomnia, nutritional and metabolic diseases of the nervous system, neurofibromatosis, tuberous sclerosis, cerebelloretinal hemangioblastomatosis, encephalotrigeminal syndrome, mental retardation and other developmental disorders of the central nervous system including Down syndrome, cerebral palsy, neuroskeletal disorders, autonomic nervous system disorders, cranial nerve disorders, spinal cord diseases, muscular dystrophy and other neuromuscular disorders, peripheral nervous system disorders, dermatomyositis and polymyositis, inherited, metabolic, endocrine, and toxic myopathies, myasthenia gravis, periodic paralysis, mental disorders including mood, anxiety, and schizophrenic disorders, seasonal affective disorder (SAD), akathesia, amnesia, catatonia, diabetic neuropathy, tardive dyskinesia, dystonias, paranoid psychoses, postherpetic neuralgia, Tourette's disorder, progressive supranuclear palsy, corticobasal degeneration, and familial frontotemporal dementia; and a developmental disorder such as renal tubular acidosis, anemia, Cushing's syndrome, achondroplastic dwarfism, Duchenne and Becker muscular dystrophy, epilepsy, gonadal dysgenesis, WAGR syndrome (Wilms' tumor, aniridia, genitourinary abnormalities, and mental retardation), Smith-Magenis syndrome, myelodysplastic syndrome, hereditary mucoepithelial dysplasia, hereditary keratodermas, hereditary neuropathies such as Charcot-Marie-Tooth disease and neurofibromatosis, hypothyroidism, hydrocephalus, seizure disorders such as Syndenham's chorea and cerebral palsy, spina bifida, anencephaly, craniorachischisis, congenital glaucoma, cataract, and sensorineural hearing loss.

[0202] In another embodiment, a vector capable of expressing TRFX or a fragment or derivative thereof may be administered to a subject to treat or prevent a disorder associated with decreased expression or activity of TRFX including, but not limited to, those described above.

[0203] In a further embodiment, a composition comprising a substantially purified TRFX in conjunction with a suitable pharmaceutical carrier may be administered to a subject to treat or prevent a disorder associated with decreased expression or activity of TRFX including, but not limited to, those provided above.

[0204] In still another embodiment, an agonist which modulates the activity of TRFX may be administered to a subject to treat or prevent a disorder associated with decreased expression or activity of TRFX including, but not limited to, those listed above.

[0205] In a further embodiment, an antagonist of TRFX may be administered to a subject to treat or prevent a disorder associated with increased expression or activity of TRFX. Examples of such disorders include, but are not limited to, those cell proliferative, autoimmune/inflammatory, neurological, and developmental disorders described above. In one aspect, an antibody which specifically binds TRFX may be used directly as an antagonist or indirectly as a targeting or delivery mechanism for bringing a pharmaceutical agent to cells or tissues which express TRFX.

[0206] In an additional embodiment, a vector expressing the complement of the polynucleotide encoding TRFX may be administered to a subject to treat or prevent a disorder associated with increased expression or activity of TRFX including, but not limited to, those described above.

[0207] In other embodiments, any of the proteins, antagonists, antibodies, agonists, complementary sequences, or vectors of the invention may be administered in combination with other appropriate therapeutic agents. Selection of the appropriate agents for use in combination therapy may be made by one of ordinary skill in the art, according to conventional pharmaceutical principles. The combination of therapeutic agents may act synergistically to effect the treatment or prevention of the various disorders described above. Using this approach, one may be able to achieve therapeutic efficacy with lower dosages of each agent, thus reducing the potential for adverse side effects.

[0208] An antagonist of TRFX may be produced using methods which are generally known in the art. In particular, purified TRFX may be used to produce antibodies or to screen libraries of pharmaceutical agents to identify those which specifically bind TRFX. Antibodies to TRFX may also be generated using methods that are well known in the art. Such antibodies may include, but are not limited to, polyclonal, monoclonal, chimeric, and single chain antibodies, Fab fragments, and fragments produced by a Fab expression library. Neutralizing antibodies (i.e., those which inhibit dimer formation) are generally preferred for therapeutic use.

[0209] For the production of antibodies, various hosts including goats, rabbits, rats, mice, humans, and others may be immunized by injection with TRFX or with any fragment or oligopeptide thereof which has immunogenic properties. Depending on the host species, various adjuvants may be used to increase immunological response. Such adjuvants include, but are not limited to, Freund's, mineral gels such as aluminum hydroxide, and surface active substances such as lysolecithin, pluronic polyols, polyanions, peptides, oil emulsions, KLH, and dinitrophenol. Among adjuvants used in humans, BCG (bacilli Calmette-Guerin) and Corynebacterium parvum are especially preferable.

[0210] It is preferred that the oligopeptides, peptides, or fragments used to induce antibodies to TRFX have an amino acid sequence consisting of at least about 5 amino acids, and generally will consist of at least about 10 amino acids. It is also preferable that these oligopeptides, peptides, or fragments are identical to a portion of the amino acid sequence of the natural protein. Short stretches of TRFX amino acids may be fused with those of another protein, such as KLH, and antibodies to the chimeric molecule may be produced.

[0211] Monoclonal antibodies to TRX may be prepared using any technique which provides for the production of antibody molecules by continuous cell lines in culture. These include, but are not limited to, the hybridoma technique, the human B-cell hybridoma technique, and the EBV-hybridoma technique. (See, e.g., Kohler, G. et al. (1975) Nature 256:495497; Kozbor, D. et al. (1985) J. Immunol. Methods 81:3142; Cote, R. J. et al. (1983) Proc. Natl. Acad. Sci. USA 80:2026-2030; and Cole, S. P. et al. (1984) Mol. Cell Biol. 62:109-120.)

[0212] In addition, techniques developed for the production of “chimeric antibodies,” such as the splicing of mouse antibody genes to human antibody genes to obtain a molecule with appropriate antigen specificity and biological activity, can be used. (See, e.g., Morrison, S. L. et al. (1984) Proc. Natl. Acad. Sci. USA 81:6851-6855; Neuberger, M. S. et al. (1984) Nature 312:604-608; and Takeda, S. et al. (1985) Nature 314:452454.) Alternatively, techniques described for the production of single chain antibodies may be adapted, using methods known in the art, to produce TRFX-specific single chain antibodies. Antibodies with related specificity, but of distinct idiotypic composition, may be generated by chain shuffling from random combinatorial immunoglobulin libraries. (See, e.g., Burton, D. R. (1991) Proc. Natl. Acad. Sci. USA 88:10134-10137.)

[0213] Antibodies may also be produced by inducing in vivo production in the lymphocyte population or by screening immunoglobulin libraries or panels of highly specific binding reagents as disclosed in the literature. (See, e.g., Orlandi, R. et al. (1989) Proc. Natl. Acad. Sci. USA 86:3833-3837; Winter, G. et al. (1991) Nature 349:293-299.)

[0214] Antibody fragments which contain specific binding sites for TRFX may also be generated. For example, such fragments include, but are not limited to, F(ab′)₂ fragments produced by pepsin digestion of the antibody molecule and Fab fragments generated by reducing the disulfide bridges of the F(ab′)₂ fragments. Alternatively, Fab expression libraries may be constructed to allow rapid and easy identification of monoclonal Fab fragments with the desired specificity. (See, e.g., Huse, W. D. et al. (1989) Science 246:1275-1281.)

[0215] Various immunoassays may be used for screening to identify antibodies having the desired specificity. Numerous protocols for competitive binding or immunoradiometric assays using either polyclonal or monoclonal antibodies with established specificities are well known in the art. Such immunoassays typically involve the measurement of complex formation between TRFX and its specific antibody. A two-site, monoclonal-based immunoassay utilizing monoclonal antibodies reactive to two non-interfering TRFX epitopes is generally used, but a competitive binding assay may also be employed (Pound, supra).

[0216] Various methods such as Scatchard analysis in conjunction with radioimmunoassay techniques may be used to assess the affinity of antibodies for TRFX. Affinity is expressed as an association constant, Kₐ, which is defined as the molar concentration of TRFX-antibody complex divided by the molar concentrations of free antigen and free antibody under equilibrium conditions. The Kₐ determined for a preparation of polyclonal antibodies, which are heterogeneous in their affinities for multiple TRFX epitopes, represents the average affinity, or avidity, of the antibodies for TRFX. The Kₐ determined for a preparation of monoclonal antibodies, which are monospecific for a particular TRFX epitope, represents a true measure of affinity. High-affinity antibody preparations with Kₐ ranging from about 10⁹ to 10¹² L/mole are preferred for use in immunoassays in which the TRFX-antibody complex must withstand rigorous manipulations. Low-affinity antibody preparations with Kₐ ranging from about 10⁶ to 10⁷ L/mole are preferred for use in immunopurification and similar procedures which ultimately require dissociation of TRFX, preferably in active form, from the antibody (Catty, D. (1988) Antibodies, Volume I: A Practical Approach, IRL Press, Washington D.C.; Liddell, J. E. and A. Cryer (1991) A Practical Guide to Monoclonal Antibodies, John Wiley & Sons, New York N.Y.).

[0217] The titer and avidity of polyclonal antibody preparations may be further evaluated to determine the quality and suitability of such preparations for certain downstream applications. For example, a polyclonal antibody preparation containing at least 1-2 mg specific antibody/ml, preferably 5-10 mg specific antibody/ml, is generally employed in procedures requiring precipitation of TRFX-antibody complexes. Procedures for evaluating antibody specificity, titer, and avidity, and guidelines for antibody quality and usage in various applications, are generally available. (See, e.g., Catty, supra, and Coligan et al., supra.)

[0218] In another embodiment of the invention, the polynucleotides encoding TRFX, or any fragment or complement thereof, may be used for therapeutic purposes. In one aspect, modifications of gene expression can be achieved by designing complementary sequences or antisense molecules (DNA, RNA, PNA, or modified oligonucleotides) to the coding or regulatory regions of the gene encoding TRFX. Such technology is well known in the art, and antisense oligonucleotides or larger fragments can be designed from various locations along the coding or control regions of sequences encoding TRFX. (See, e.g., Agrawal, S., ed. (1996) Antisense Therapeutics, Humana Press Inc., Totawa N.J.)

[0219] In therapeutic use, any gene delivery system suitable for introduction of the antisense sequences into appropriate target cells can be used. Antisense sequences can be delivered intracellularly in the form of an expression plasmid which, upon transcription, produces a sequence complementary to at least a portion of the cellular sequence encoding the target protein. (See, e.g., Slater, J. E. et al. (1998) J. Allergy Clin. Immunol. 102(3):469-475; and Scanlon, K. J. et al. (1995) 9(13):1288-1296.) Antisense sequences can also be introduced intracellularly through the use of viral vectors, such as retrovirus and adeno-associated virus vectors. (See, e.g., Miller, A. D. (1990) Blood 76:271; Ausubel, supra; Uckert, W. and W. Walther (1994) Pharmacol. Ther. 63(3):323-347.) Other gene delivery mechanisms include liposome-derived systems, artificial viral envelopes, and other systems known in the art. (See, e.g., Rossi, J. J. (1995) Br. Med. Bull. 51(1):217-225; Boado, R. J. et al. (1998) J. Pharm. Sci. 87(11):1308-1315; and Morris, M. C. et al. (1997) Nucleic Acids Res. 25(14):2730-2736.)

[0220] In another embodiment of the invention, polynucleotides encoding TRFX may be used for somatic or germline gene therapy. Gene therapy may be performed to (i) correct a genetic deficiency (e.g., in the cases of severe combined immunodeficiency (SCID)-X1 disease characterized by X-linked inheritance (Cavazzanaalvo, M. et al. (2000) Science 288:669-672), severe combined immunodeficiency syndrome associated with an inherited adenosine deaminase (ADA) deficiency (Blaese, R. M. et al. (1995) Science 270:475-480; Bordignon, C. et al. (1995) Science 270:470-475), cystic fibrosis (Zabner, J. et al. (1993) Cell 75:207-216; Crystal, R. G. et al. (1995) Hum. Gene Therapy 6:643-666; Crystal, R. G. et al. (1995) Hum Gene Therapy 6:667-703), thalassamias, familial hypercholesterolemia, and hemophilia resulting from Factor VIII or Factor IX deficiencies (Crystal, R. G. (1995) Science 270:404410; Verma, IM. and N. Somia (1997) Nature 389:239-242)), (ii) express a conditionally lethal gene product (e.g., in the case of cancers which result from unregulated cell proliferation), or (iii) express a protein which affords protection against intracellular parasites (e.g., against human retroviruses, such as human immunodeficiency virus (HN) (Baltimore, D. (1988) Nature 335:395-396; Poeschla, E. et al. (1996) Proc. Natl. Acad. Sci. USA. 93:11395-11399), hepatitis B or C virus (HBV, HCV); fungal parasites, such as Candida albicans and Paracoccidioides brasiliensis; and protozoan parasites such as Plasmodium falciparum and Tryvanosoma cruzi). In the case where a genetic deficiency in TRFX expression or regulation causes disease, the expression of TRFX from an appropriate population of transduced cells may alleviate the clinical manifestations caused by the genetic deficiency.

[0221] In a further embodiment of the invention, diseases or disorders caused by deficiencies in TRFX are treated by constructing mammalian expression vectors encoding TRFX and introducing these vectors by mechanical means into TRFX-deficient cells. Mechanical transfer technologies for use with cells in vivo or ex vitro include (i) direct DNA microinjection into individual cells, (ii) ballistic gold particle delivery, (iii) liposome-mediated transfection, (iv) receptor-mediated gene transfer, and (v) the use of DNA transposons (Morgan, R. A. and W. Anderson (1993) Annu. Rev. Biochem. 62:191-217; Ivics, Z. (1997) Cell 91:501-510; Boulay, J-L. and H. Récipon (1998) Curr. Opin. Biotechnol. 9:445-450).

[0222] Expression vectors that may be effective for the expression of TRFX include, but are not limited to, the PCDNA 3.1, EPITAG, PRCCMV2, PREP, PVAX vectors (Invitrogen, Carlsbad Calif.), PCMV-SCRIPT, PCMV-TAG, PEGSH/PERV (Stratagene, La Jolla Calif.), and PTET-OFF, PTET-ON, PTRE2, PTRE2-LUC, PTK-HYG (Clontech, Palo Alto Calif.). TRFX may be expressed using (i) a constitutively active promoter, (e.g., from cytomegalovirus (CMV), Rous sarcoma virus (RSV), SV40 virus, thymidine kinase (TK), or β-actin genes), (ii) an inducible promoter (e.g., the tetracycline-regulated promoter (Gossen, M. and H. Bujard (1992) Proc. Natl. Acad. Sci. USA 89:5547-5551; Gossen, M. et al. (1995) Science 268:1766-1769; Rossi, F. M. V. and H. M. Blau (1998) Curr. Opin. Biotechnol. 9:451-456), commercially available in the T-REX plasmid (Invitrogen)); the ecdysone-inducible promoter (available in the plasmids PVGRXR and PIND; Invitrogen); the FK506/rapamycin inducible promoter; or the RU486/mifepristone inducible promoter (Rossi, F. M. V. and H. M. Blau, supra)), or (iii) a tissue-specific promoter or the native promoter of the endogenous gene encoding TRFX from a normal individual.

[0223] Commercially available liposome transformation kits (e.g., the PERFECT LIPID TRANSFECTION KIT, available from Invitrogen) allow one with ordinary skill in the art to deliver polynucleotides to target cells in culture and require minimal effort to optimize experimental parameters. In the alternative, transformation is performed using the calcium phosphate method (Graham, F. L. and A. J. Eb (1973) Virology 52:456-467), or by electroporation (Neumann, E. et al. (1982) EMBO J. 1:841-845). The introduction of DNA to primary cells requires modification of these standardized mammalian transfection protocols.

[0224] In another embodiment of the invention, diseases or disorders caused by genetic defects with respect to TRFX expression are treated by constructing a retrovirus vector consisting of (i) the polynucleotide encoding TRFX under the control of an independent promoter or the retrovirus long terminal repeat (LTR) promoter, (ii) appropriate RNA packaging signals, and (iii) a Rev-responsive element (RRE) along with additional retrovirus cis-acting RNA sequences and coding sequences required for efficient vector propagation. Retrovirus vectors (e.g., PFB and PFBNEO) are cornmercially available (Stratagene) and are based on published data (Riviere, I. et al. (1995) Proc. Natl. Acad. Sci. USA 92:6733-6737), incorporated by reference herein. The vector is propagated in an appropriate vector producing cell line (VPCL) that expresses an envelope gene with a tropism for receptors on the target cells or a promiscuous envelope protein such as VSVg (Armentano, D. et al. (1987) J. Virol. 61:1647-1650; Bender, M. A. et al. (1987) J. Virol. 61:1639-1646; Adam, M. A. and A. D. Miller (1988) J. Virol. 62:3802-3806; Dull, T. et al. (1998) J. Virol. 72:8463-8471; Zufferey, R. et al. (1998) J. Virol. 72:9873-9880). U.S. Pat. No. 5,910,434 to Rigg (“Method for obtaining retrovirus packaging cell lines producing high transducing efficiency retroviral supernatant”) discloses a method for obtaining retrovirus packaging cell lines and is hereby incorporated by reference. Propagation of retrovirus vectors, transduction of a population of cells (e.g., CD4⁺ T-cells), and the return of transduced cells to a patient are procedures well known to persons skilled in the art of gene therapy and have been well documented (Ranga, U. et al. (1997) J. Virol. 71:7020-7029; Bauer, G. et al. (1997) Blood 89:2259-2267; Bonyhadi, M L. (1997) J. Virol. 71:4707-4716; Ranga, U. et al. (1998) Proc. Natl. Acad. Sci. USA 95:1201-1206; Su, L. (1997) Blood 89:2283-2290).

[0225] In the alternative, an adenovirus-based gene therapy delivery system is used to deliver polynucleotides encoding TRFX to cells which have one or more genetic abnormalities with respect to the expression of TRFX. The construction and packaging of adenovirus-based vectors are well known to those with ordinary skill in the art. Replication defective adenovirus vectors have proven to be versatile for importing genes encoding immunoregulatory proteins into intact islets in the pancreas (Csete, M. E. et al. (1995) Transplantation 27:263-268). Potentially useful adenoviral vectors are described in U.S. Pat. No. 5,707,618 to Armentano (“Adenovirus vectors for gene therapy”), hereby incorporated by reference. For adenoviral vectors, see also Antinozzi, P. A. et al. (1999) Annu. Rev. Nutr. 19:511-544; and Verma, L. M. and N. Somia (1997) Nature 18:389:239-242, both incorporated by reference herein.

[0226] In another alternative, a herpes-based, gene therapy delivery system is used to deliver polynucleotides encoding TRFX to target cells which have one or more genetic abnormalities with respect to the expression of TRFX. The use of herpes simplex virus (HSV)-based vectors may be especially valuable for introducing TRFX to cells of the central nervous system, for which HSV has a tropism. The construction and packaging of herpes-based vectors are well known to those with ordinary skill in the art. A replication-competent herpes simplex virus (HSV) type 1-based vector has been used to deliver a reporter gene to the eyes of primates (Liu, X. et al. (1999) Exp. Eye Res. 169:385-395). The construction of a HSV-1 virus vector has also been disclosed in detail in U.S. Pat. No. 5,804,413 to DeLuca (“Herpes simplex virus strains for gene transfer”), which is hereby incorporated by reference. U.S. Pat. No. 5,804,413 teaches the use of recombinant HSV d92 which consists of a genome containing at least one exogenous gene to be transferred to a cell under the control of the appropriate promoter for purposes including human gene therapy. Also taught by this patent are the construction and use of recombinant HSV strains deleted for ICP4, ICP27 and ICP22. For HSV vectors, see also Goins, W. F. et al. (1999) J. Virol. 73:519-532 and Xu, H. et al. (1994) Dev. Biol. 163:152-161, hereby incorporated by reference. The manipulation of cloned herpesvirus sequences, the generation of recombinant virus following the transfection of multiple plasmids containing different segments of the large herpesvirus genomes, the growth and propagation of herpesvirus, and the infection of cells with herpesvirus are techniques well known to those of ordinary skill in the art.

[0227] In another alternative, an alphavirus (positive, single-stranded RNA virus) vector is used to deliver polynucleotides encoding TRFX to target cells. The biology of the prototypic alphavirus, Semliki Forest Virus (SFV), has been studied extensively and gene transfer vectors have been based on the SFV genome (Garoff, H. and K.-J. Li (1998) Curr. Opin. Biotechnol. 9:464469). During alphavirus RNA replication, a subgenomic RNA is generated that normally encodes the viral capsid proteins. This subgenornic RNA replicates to higher levels than the full-length genomic RNA, resulting in the overproduction of capsid proteins relative to the viral proteins with enzymatic activity (e.g., protease and polymerase). Similarly, inserting the coding sequence for TRFX into the alphavirus genome in place of the capsid-coding region results in the production of a large number of TRFX-coding RNAs and the synthesis of high levels of TRFX in vector transduced cells. While alphavirus infection is typically associated with cell lysis within a few days, the ability to establish a persistent infection in hamster normal kidney cells (BHK-21) with a variant of Sindbis virus (SIN) indicates that the lytic replication of alphaviruses can be altered to suit the needs of the gene therapy application (Dryga, S. A. et al. (1997) Virology 228:74-83). The wide host range of alphaviruses will allow the introduction of TRFX into a variety of cell types. The specific transduction of a subset of cells in a population may require the sorting of cells prior to transduction. The methods of manipulating infectious cDNA clones of alphaviruses, performing alphavirus cDNA and RNA transfections, and performing alphavirus infections, are well known to those with ordinary skill in the art.

[0228] Oligonucleotides derived from the transcription initiation site, e.g., between about positions −10 and +10 from the start site, may also be employed to inhibit gene expression. Similarly, inhibition can be achieved using triple helix base-pairing methodology. Triple helix pairing is useful because it causes inhibition of the ability of the double helix to open sufficiently for the binding of polymerases, transcription factors, or regulatory molecules. Recent therapeutic advances using triplex DNA have been described in the literature. (See, e.g., Gee, J. E. et al. (1994) in Huber, B. E. and B. I. Carr, Molecular and Immunologic Aproaches, Futura Publishing, Mt. Kisco N.Y., pp. 163-177.) A complementary sequence or antisense molecule may also be designed to block translation of mRNA by preventing the transcript from binding to ribosomes.

[0229] Ribozymes, enzymatic RNA molecules, may also be used to catalyze the specific cleavage of RNA. The mechanism of ribozyme action involves sequence-specific hybridization of the ribozyme molecule to complementary target RNA, followed by endonucleolytic cleavage. For example, engineered hammerhead motif ribozyme molecules may specifically and efficiently catalyze endonucleolytic cleavage of sequences encoding TRFX.

[0230] Specific ribozyme cleavage sites within any potential RNA target are initially identified by scanning the target molecule for ribozyme cleavage sites, including the following sequences: GUA, GUU, and GUC. Once identified, short RNA sequences of between 15 and 20 ribonucleotides, corresponding to the region of the target gene containing the cleavage site, may be evaluated for secondary structural features which may render the oligonucleotide inoperable. The suitability of candidate targets may also be evaluated by testing accessibility to hybridization with complementary oligonucleotides using ribonuclease protection assays.

[0231] Complementary ribonucleic acid molecules and ribozymes of the invention may be prepared by any method known in the art for the synthesis of nucleic acid molecules. These include techniques for chemically synthesizing oligonucleotides such as solid phase phosphoramidite chemical synthesis. Alternatively, RNA molecules may be generated by in vitro and in vivo transcription of DNA sequences encoding TRFX. Such DNA sequences may be incorporated into a wide variety of vectors with suitable RNA polymerase promoters such as T7 or SP6. Alternatively, these cDNA constructs that synthesize complementary RNA, constitutively or inducibly, can be introduced into cell lines, cells, or tissues.

[0232] RNA molecules may be modified to increase intracellular stability and half-life. Possible modifications include, but are not limited to, the addition of flanking sequences at the 5′ and/or 3′ ends of the molecule, or the use of phosphorothioate or 2′O-methyl rather than phosphodiesterase linkages within the backbone of the molecule. This concept is inherent in the production of PNAs and can be extended in all of these molecules by the inclusion of nontraditional bases such as inosine, queosine, and wybutosine, as well as acetyl-, methyl-, thio-, and similarly modified forms of adenine, cytidine, guanine, thymine, and uridine which are not as easily recognized by endogenous endoniucleases.

[0233] An additional embodiment of the invention encompasses a method for screening for a compound which is effective in altering expression of a polynucleotide encoding TRFX. Compounds which may be effective in altering expression of a specific polynucleotide may include, but are not limited to, oligonucleotides, antisense oligonucleotides, triple helix-forming oligonucleotides, transcription factors and other polypeptide transcriptional regulators, and non-macromolecular chemical entities which are capable of interacting with specific polynucleotide sequences. Effective compounds may alter polynucleotide expression by acting as either inhibitors or promoters of polynucleotide expression. Thus, in the treatment of disorders associated with increased TRFX expression or activity, a compound which specifically inhibits expression of the polynucleotide encoding TRFX may be therapeutically useful, and in the treatment of disorders associated with decreased TRFX expression or activity, a compound which specifically promotes expression of the polynucleotide encoding TRFX may be therapeutically useful.

[0234] At least one, and up to a plurality, of test compounds may be screened for effectiveness in altering expression of a specific polynucleotide. A test compound may be obtained by any method commonly known in the art, including chemical modification of a compound known to be effective in altering polynucleotide expression; selection from an existing, commercially-available or proprietary library of naturally-occurring or non-natural chemical compounds; rational design of a compound based on chemical and/or structural properties of the target polynucleotide; and selection from a library of chemical compounds created combinatorially or randomly. A sample comprising a polynucleotide encoding TRFX is exposed to at least one test compound thus obtained. The sample may comprise, for example, an intact or permeabilized cell, or an in vitro cell-free or reconstituted biochemical system. Alterations in the expression of a polynucleotide encoding TRFX are assayed by any method commonly known in the art. Typically, the expression of a specific nucleotide is detected by hybridization with a probe having a nucleotide sequence complementary to the sequence of the polynucleotide encoding TRFX. The amount of hybridization may be quantified, thus forming the basis for a comparison of the expression of the polynucleotide both with and without exposure to one or more test compounds. Detection of a change in the expression of a polynucleotide exposed to a test compound indicates that the test compound is effective in altering the expression of the polynucleotide. A screen for a compound effective in altering expression of a specific polynucleotide can be carried out, for example, using a Schizosaccharomvces pombe gene expression system (Atkins, D. et al. (1999) U.S. Pat. No. 5,932,435; Arndt, G. M. et al. (2000) Nucleic Acids Res. 28:E15) or a human cell line such as HeLa cell (Clarke, M. L. et al. (2000) Biochem. Biophys. Res. Commun. 268:8-13). A particular embodiment of the present invention involves screening a combinatorial library of oligonucleotides (such as deoxyribonucleotides, ribonucleotides, peptide nucleic acids, and modified oligonucleotides) for antisense activity against a specific polynucleotide sequence (Bruice, T. W. et al. (1997) U.S. Pat. No. 5,686,242; Bruice, T. W. et al. (2000) U.S. Pat. No. 6,022,691).

[0235] Many methods for introducing vectors into cells or tissues are available and equally suitable for use in vivo, in vitro, and ex vivo. For ex vivo therapy, vectors may be introduced into stem cells taken from the patient and clonally propagated for autologous transplant back into that same patient. Delivery by transfection, by liposome injections, or by polycationic amino polymers may be achieved using methods which are well known in the art. (See, e.g., Goldman, C. K. et al. (1997) Nat. Biotechnol. 15:462-466.)

[0236] Any of the therapeutic methods described above may be applied to any subject in need of such therapy, including, for example, mammals such as humans, dogs, cats, cows, horses, rabbits, and monkeys.

[0237] An additional embodiment of the invention relates to the administration of a composition which generally comprises an active ingredient formulated with a pharmaceutically acceptable excipient. Excipients may include, for example, sugars, starches, celluloses, gums, and proteins. Various formulations are commonly known and are thoroughly discussed in the latest edition of Remington's Pharmaceutical Sciences (Maack Publishing, Easton Pa.). Such compositions may consist of TRFX, antibodies to TRFX, and mimetics, agonists, antagonists, or inhibitors of TRFX.

[0238] The compositions utilized in this invention may be administered by any number of routes including, but not limited to, oral, intravenous, intramuscular, intra-arterial, intramedullary, intrathecal, intraventricular, pulmonary, transdermal, subcutaneous, intraperitoneal, intranasal, enteral, topical, sublingual, or rectal means.

[0239] Compositions for pulmonary administration may be prepared in liquid or dry powder form. These compositions are generally aerosolized immediately prior to inhalation by the patient. In the case of small molecules (e.g. traditional low molecular weight organic drugs), aerosol delivery of fast-acting formulations is well-known in the art. In the case of macromolecules (e.g. larger peptides and proteins), recent developments in the field of pulmonary delivery via the alveolar region of the lung have enabled the practical delivery of drugs such as insulin to blood circulation (see, e.g., Patton, J. S. et al., U.S. Pat. No. 5,997,848). Pulmonary delivery has the advantage of administration without needle injection, and obviates the need for potentially toxic penetration enhancers.

[0240] Compositions suitable for use in the invention include compositions wherein the active ingredients are contained in an effective amount to achieve the intended purpose. The determination of an effective dose is well within the capability of those skilled in the art.

[0241] Specialized forms of compositions may be prepared for direct intracellular delivery of macromolecules comprising TRFX or fragments thereof. For example, liposome preparations containing a cell-impermeable macromolecule may promote cell fusion and intracellular delivery of the macromolecule. Alternatively, TRFX or a fragment thereof may be joined to a short cationic N-terminal portion from the HIV Tat-1 protein. Fusion proteins thus generated have been found to transduce into the cells of all tissues, including the brain, in a mouse model system (Schwarze, S. R. et al. (1999) Science 285:1569-1572).

[0242] For any compound, the therapeutically effective dose can be estimated initially either in cell culture assays, e.g., of neoplastic cells, or in animal models such as mice, rats, rabbits, dogs, monkeys, or pigs. An animal model may also be used to determine the appropriate concentration range and route of administration. Such information can then be used to determine useful doses and routes for administration in humans.

[0243] A therapeutically effective dose refers to that amount of active ingredient, for example TRFX or fragments thereof, antibodies of TRFX, and agonists, antagonists or inhibitors of TRFX, which ameliorates the symptoms or condition. Therapeutic efficacy and toxicity may be determined by standard pharmaceutical procedures in cell cultures or with experimental animals, such as by calculating the ED₅₀ (the dose therapeutically effective in 50% of the population) or LD₅₀ (the dose lethal to 50% of the population) statistics. The dose ratio of toxic to therapeutic effects is the therapeutic index, which can be expressed as the LD₅₀/ED₅₀ ratio. Compositions which exhibit large therapeutic indices are preferred. The data obtained from cell culture assays and animal studies are used to formulate a range of dosage for human use. The dosage contained in such compositions is preferably within a range of circulating concentrations that includes the ED₅₀ with little or no toxicity. The dosage varies within this range depending upon the dosage form employed, the sensitivity of the patient, and the route of administration.

[0244] The exact dosage will be determined by the practitioner, in light of factors related to the subject requiring treatment. Dosage and administration are adjusted to provide sufficient levels of the active moiety or to maintain the desired effect. Factors which may be taken into account include the severity of the disease state, the general health of the subject, the age, weight, and gender of the subject, time and frequency of administration, drug combination(s), reaction sensitivities, and response to therapy. Long-acting compositions may be administered every 3 to 4 days, every week, or biweekldy depending on the half-life and clearance rate of the particular formulation.

[0245] Normal dosage amounts may vary from about 0.1 μg to 100,000 μg, up to a total dose of about 1 gram, depending upon the route of administration. Guidance as to particular dosages and methods of delivery is provided in the literature and generally available to practitioners in the art. Those skilled in the art will employ different formulations for nucleotides than for proteins or their inhibitors. Similarly, delivery of polynucleotides or polypeptides will be specific to particular cells, conditions, locations, etc.

[0246] Diagnostics

[0247] In another embodiment, antibodies which specifically bind TRFX may be used for the diagnosis of disorders characterized by expression of TRFX, or in assays to monitor patients being treated with TRFX or agonists, antagonists, or inhibitors of TRFX. Antibodies useful for diagnostic purposes may be prepared in the same manner as described above for therapeutics. Diagnostic assays for TRFX include methods which utilize the antibody and a label to detect TRFX in human body fluids or in extracts of cells or tissues. The antibodies may be used with or without modification, and may be labeled by covalent or non-covalent attachment of a reporter molecule. A wide variety of reporter molecules, several of which are described above, are known in the art and may be used.

[0248] A variety of protocols for measuring TRFX, including ELISAs, RIAs, and FACS, are known in the art and provide a basis for diagnosing altered or abnormal levels of TRFX expression. Normal or standard values for TRFX expression are established by combining body fluids or cell extracts taken from normal mammalian subjects, for example, human subjects, with antibody to TRFX under conditions suitable for complex formation. The amount of standard complex formation may be quantitated by various methods, such as photometric means. Quantities of TRFX expressed in subject, control, and disease samples from biopsied tissues are compared with the standard values. Deviation between standard and subject values establishes the parameters for diagnosing disease.

[0249] In another embodiment of the invention, the polynucleotides encoding TRFX may be used for diagnostic purposes. The polynucleotides which may be used include oligonucleotide sequences, complementary RNA and DNA molecules, and PNAs. The polynucleotides may be used to detect and quantify gene expression in biopsied tissues in which expression of TRFX may be correlated with disease. The diagnostic assay may be used to determine absence, presence, and excess expression of TRFX, and to monitor regulation of TRFX levels during therapeutic intervention.

[0250] In one aspect, hybridization with PCR probes which are capable of detecting polynucleotide sequences, including genomic sequences, encoding TRFX or closely related molecules may be used to identify nucleic acid sequences which encode TRFX. The specificity of the probe, whether it is made from a highly specific region, e.g., the 5′regulatory region, or from a less specific region, e.g., a conserved motif, and the stringency of the hybridization or amplification will determine whether the probe identifies only naturally occurring sequences encoding TRFX, allelic variants, or related sequences.

[0251] Probes may also be used for the detection of related sequences, and may have at least 50% sequence identity to any of the TRFX encoding sequences. The hybridization probes of the subject invention may be DNA or RNA and may be derived from the sequence of SEQ ID NO:108-214 or from genomic sequences including promoters, enhancers, and introns of the TRFX gene.

[0252] Means for producing specific hybridization probes for DNAs encoding TRFX include the cloning of polynucleotide sequences encoding TRFX or TRFX derivatives into vectors for the production of mRNA probes. Such vectors are known in the art, are commercially available, and may be used to synthesize RNA probes in vitro by means of the addition of the appropriate RNA polymerases and the appropriate labeled nucleotides. Hybridization probes may be labeled by a variety of reporter groups, for example, by radionuclides such as ³²P or ³⁵S, or by enzymatic labels, such as alkaline phosphatase coupled to the probe via avidin/biotin coupling systems, and the like.

[0253] Polynucleotide sequences encoding TRFX may be used for the diagnosis of disorders associated with expression of TRFX. Examples of such disorders include, but are not limited to, a cell proliferative disorder such as actinic keratosis, arteriosclerosis, atherosclerosis, bursitis, cirrhosis, hepatitis, mixed connective tissue disease (MCTD), myelofibrosis, paroxysmal nocturnal hemoglobinuria, polycythemia vera, psoriasis, primary thrombocythemia, and cancers including adenocarcinoma, leukemia, lymphoma, melanoma, myeloma, sarcoma, teratocarcinoma, and, in particular, cancers of the adrenal gland, bladder, bone, bone marrow, brain, breast, cervix, gall bladder, ganglia, gastrointestinal tract, heart, kidney, liver, lung, muscle, ovary, pancreas, parathyroid, penis, prostate, salivary glands, skin, spleen, testis, thymus, thyroid, and uterus; an autoimmune/inflammatory disorder such as acquired immunodeficiency syndrome (AIDS), Addison's disease, adult respiratory distress syndrome, allergies, ankylosing spondylitis, amyloidosis, anemia, asthma, atherosclerosis, autoimmune hemolytic anemia, autoimmune thyroiditis, autoinmmune polyendocrinopathy-candidiasis-ectodermal dystrophy (APECED), bronchitis, cholecystitis, contact dermatitis, Crohn's disease, atopic dermatitis, dermatomyositis, diabetes mellitus, emphysema, episodic lymphopenia with lymphocytotoxins, erythroblastosis fetalis, erythema nodosum, atrophic gastritis, glomerulonephritis, Goodpasture's syndrome, gout, Graves' disease, Hashimoto's thyroiditis, hypereosinophilia, irritable bowel syndrome, multiple sclerosis, myasthenia gravis, myocardial or pericardial inflammation, osteoarthritis, osteoporosis, pancreatitis, polymyositis, psoriasis, Reiter's syndrome, rheumatoid arthritis, scieroderma, Sjögren's syndrome, systemic anaphylaxis, systemic lupus erythematosus, systemic sclerosis, thrombocytopenic purpura, ulcerative colitis, uveitis, Werner syndrome, complications of cancer, hemodialysis, and extracorporeal circulation, viral, bacterial, fungal, parasitic, protozoal, and helminthic infections, and trauma; a neurological disorder such as epilepsy, ischemic cerebrovascular disease, stroke, cerebral neoplasms, Alzheimer's disease, Pick's disease, Huntington's disease, dementia, Parkinson's disease and other extrapyramidal disorders, amyotrophic lateral sclerosis and other motor neuron disorders, progressive neural muscular atrophy, retinitis pigmentosa, hereditary ataxias, multiple sclerosis and other demyelinating diseases, bacterial and viral meningitis, brain abscess, subdural empyema, epidural abscess, suppurative intracranial thrombophlebitis, myelitis and radiculitis, viral central nervous system disease, prion diseases including kuru, Creutzfeldt-Jakob disease, and Gerstmann-Straussler-Scheinker syndrome, fatal familial insomnia, nutritional and metabolic diseases of the nervous system, neurofibromatosis, tuberous sclerosis, cerebelloretinal hemangioblastomatosis, encephalotrigeminal syndrome, mental retardation and other developmental disorders of the central nervous system including Down syndrome, cerebral palsy, neuroskeletal disorders, autonomic nervous system disorders, cranial nerve disorders, spinal cord diseases, muscular dystrophy and other neuromuscular disorders, peripheral nervous system disorders, dermatomyositis and polymyositis, inherited, metabolic, endocrine, and toxic myopathies, myasthenia gravis, periodic paralysis, mental disorders including mood, anxiety, and schizophrenic disorders, seasonal affective disorder (SAD), akathesia, amnesia, catatonia, diabetic neuropathy, tardive dyskinesia, dystonias, paranoid psychoses, postherpetic neuralgia, Tourette's disorder, progressive supranuclear palsy, corticobasal degeneration, and familial frontotemporal dementia; and a developmental disorder such as renal tubular acidosis, anemia, Cushing's syndrome, achondroplastic dwarfism, Duchenne and Becker muscular dystrophy, epilepsy, gonadal dysgenesis, WAGR syndrome (Wilms' tumor, aniridia, genitourinary abnormalities, and mental retardation), Smith-Magenis syndrome, myelodysplastic syndrome, hereditary mucoepithelial dysplasia, hereditary keratodermas, hereditary neuropathies such as Charcot-Marie-Tooth disease and neurofibromatosis, hypothyroidism, hydrocephalus, seizure disorders such as Syndenham's chorea and cerebral palsy, spina bifida, anencephaly, craniorachischisis, congenital glaucoma, cataract, and sensorineural hearing loss. The polynucleotide sequences encoding TRFX may be used in Southern or northern analysis, dot blot, or other membrane-based technologies; in PCR technologies; in dipstick, pin, and multiformat ELISA-like assays; and in microarrays utilizing fluids or tissues from patients to detect altered TRFX expression. Such qualitative or quantitative methods are well known in the art.

[0254] In a particular aspect, the nucleotide sequences encoding TRFX may be useful in assays that detect the presence of associated disorders, particularly those mentioned above. The nucleotide sequences encoding TRFX may be labeled by standard methods and added to a fluid or tissue sample from a patient under conditions suitable for the formation of hybridization complexes. After a suitable incubation period, the sample is washed and the signal is quantified and compared with a standard value. If the amount of signal in the patient sample is significantly altered in comparison to a control sample then the presence of altered levels of nucleotide sequences encoding TRFX in the sample indicates the presence of the associated disorder. Such assays may also be used to evaluate the efficacy of a particular therapeutic treatment regimen in animal studies, in clinical trials, or to monitor the treatment of an individual patient.

[0255] In order to provide a basis for the diagnosis of a disorder associated with expression of TRFX, a normal or standard profile for expression is established. This may be accomplished by combining body fluids or cell extracts taken from normal subjects, either animal or human, with a sequence, or a fragment thereof, encoding TRFX, under conditions suitable for hybridization or amplification. Standard hybridization may be quantified by comparing the values obtained from normal subjects with values from an experiment in which a known amount of a substantially purified polynucleotide is used. Standard values obtained in this manner may be compared with values obtained from samples from patients who are symptomatic for a disorder. Deviation from standard values is used to establish the presence of a disorder.

[0256] Once the presence of a disorder is established and a treatment protocol is initiated, hybridization assays may be repeated on a regular basis to determine if the level of expression in the patient begins to approximate that which is observed in the normal subject. The results obtained from successive assays may be used to show the efficacy of treatment over a period ranging from several days to months.

[0257] With respect to cancer, the presence of an abnormal amount of transcript (either under- or overexpressed) in biopsied tissue from an individual may indicate a predisposition for the development of the disease, or may provide a means for detecting the disease prior to the appearance of actual clinical symptoms. A more definitive diagnosis of this type may allow health professionals to employ preventative measures or aggressive treatment earlier thereby preventing the development or further progression of the cancer.

[0258] Additional diagnostic uses for oligonucleotides designed from the sequences encoding TRFX may involve the use of PCR. These oligomers may be chemically synthesized, generated enzymatically, or produced in vitro. Oligomers will preferably contain a fragment of a polynucleotide encoding TRFX, or a fragment of a polynucleotide complementary to the polynucleotide encoding TRFX, and will be employed under optimized conditions for identification of a specific gene or condition. Oligomers may also be employed under less stringent conditions for detection or quantification of closely related DNA or RNA sequences.

[0259] In a particular aspect, oligonucleotide primers derived from the polynucleotide sequences encoding TRFX may be used to detect single nucleotide polymorphisms (SNPs). SNPs are substitutions, insertions and deletions that are a frequent cause of inherited or acquired genetic disease in humans. Methods of SNP detection include, but are not limited to, single-stranded conformation polymorphism (SSCP) and fluorescent SSCP (FSSCP) methods. In SSCP, oligonucleotide primers derived from the polynucleotide sequences encoding TRFX are used to amplify DNA using the polymerase chain reaction (PCR). The DNA may be derived, for example, from diseased or normal tissue, biopsy samples, bodily fluids, and the like. SNPs in the DNA cause differences in the secondary and tertiary structures of PCR products in single-stranded form, and these differences are detectable using gel electrophoresis in non-denaturing gels. In fSCCP, the oligonucleotide primers are fluorescently labeled, which allows detection of the amplimers in high-throughput equipment such as DNA sequencing machines. Additionally, sequence database analysis methods, termed in silico SNP (is SNP), are capable of identifying polymorphisms by comparing the sequence of individual overlapping DNA fragments which assemble into a common consensus sequence. These computer-based methods filter out sequence variations due to laboratory preparation of DNA and sequencing errors using statistical models and automated analyses of DNA sequence chromatograms. In the alternative, SNPs may be detected and characterized by mass spectrometry using, for example, the high throughput MASSARRAY system (Sequenom, Inc., San Diego Calif.).

[0260] Methods which may also be used to quantify the expression of TRFX include radiolabeling or biotinylating nucleotides, coamplification of a control nucleic acid, and interpolating results from standard curves. (See, e.g., Melby, P. C. et al. (1993) J. Immunol. Methods 159:235-244; Duplaa, C. et al. (1993) Anal. Biochem. 212:229-236.) The speed of quantitation of multiple samples may be accelerated by running the assay in a high-throughput format where the oligomer or polynucleotide of interest is presented in various dilutions and a spectrophotometric or colorimetric response gives rapid quantitation.

[0261] In further embodiments, oligonucleotides or longer fragments derived from any of the polynucleotide sequences described herein may be used as elements on a microarray. The microarray can be used in transcript imaging techniques which monitor the relative expression levels of large numbers of genes simultaneously as described in Seilhamer, J. J. et al., “Comparative Gene Transcript Analysis,” U.S. Pat. No. 5,840,484, incorporated herein by reference. The microarray may also be used to identify genetic variants, mutations, and polymorphisms. This information may be used to determine gene function, to understand the genetic basis of a disorder, to diagnose a disorder, to monitor progression/regression of disease as a function of gene expression, and to develop and monitor the activities of therapeutic agents in the treatment of disease. In particular, this information may be used to develop a pharmacogenomic profile of a patient in order to select the most appropriate and effective treatment regimen for that patient. For example, therapeutic agents which are highly effective and display the fewest side effects may be selected for a patient based on his/her pharmacogenomic profile.

[0262] In another embodiment, antibodies specific for TRFX, or TRFX or fragments thereof may be used as elements on a microarray. The microarray may be used to monitor or measure protein-protein interactions, drug-target interactions, and gene expression profiles, as described above.

[0263] A particular embodiment relates to the use of the polynucleotides of the present invention to generate a transcript image of a tissue or cell type. A transcript image represents the global pattern of gene expression by a particular tissue or cell type. Global gene expression patterns are analyzed by quantifying the number of expressed genes and their relative abundance under given conditions and at a given time. (See Seilhamer et al., “Comparative Gene Transcript Analysis,” U.S. Pat. No. 5,840,484, expressly incorporated by reference herein.) Thus a transcript image may be generated by hybridizing the polynucleotides of the present invention or their complements to the totality of transcripts or reverse transcripts of a particular tissue or cell type. In one embodiment, the hybridization takes place in high-throughput format, wherein the polynucleotides of the present invention or their complements comprise a subset of a plurality of elements on a microarray. The resultant transcript image would provide a profile of gene activity.

[0264] Transcript images may be generated using transcripts isolated from tissues, cell lines, biopsies, or other biological samples. The transcript image may thus reflect gene expression in vivo, as in the case of a tissue or biopsy sample, or in vitro, as in the case of a cell line.

[0265] Transcript images which profile the expression of the polynucleotides of the present invention may also be used in conjunction with in vitro model systems and preclinical evaluation of pharmaceuticals, as well as toxicological testing of industrial and naturally-occurring environmental compounds. All compounds induce characteristic gene expression patterns, frequently termed molecular fingerprints or toxicant signatures, which are indicative of mechanisms of action and toxicity (Nuwaysir, E. F. et al. (1999) Mol. Carcinog. 24:153-159; Steiner, S. and N. L. Anderson (2000) Toxicol. Lett. 112-113:467-471, expressly incorporated by reference herein). If a test compound has a signature similar to that of a compound with known toxicity, it is likely to share those toxic properties. These fingerprints or signatures are most useful and refined when they contain expression information from a large number of genes and gene families. Ideally, a genome-wide measurement of expression provides the highest quality signature. Even genes whose expression is not altered by any tested compounds are important as well, as the levels of expression of these genes are used to normalize the rest of the expression data. The normalization procedure is useful for comparison of expression data after treatment with different compounds. While the assignment of gene function to elements of a toxicant signature aids in interpretation of toxicity mechanisms, knowledge of gene function is not necessary for the statistical matching of signatures which leads to prediction of toxicity. (See, for example, Press Release 00-02 from the National Institute of Environmental Health Sciences, released Feb. 29, 2000, available at http://www.niehs.nih.gov/oc/news/toxchip.htm.) Therefore, it is important and desirable in toxicological screening using toxicant signatures to include all expressed gene sequences.

[0266] In one embodiment, the toxicity of a test compound is assessed by treating a biological sample containing nucleic acids with the test compound. Nucleic acids that are expressed in the treated biological sample are hybridized with one or more probes specific to the polynucleotides of the present invention, so that transcript levels corresponding to the polynucleotides of the present invention may be quantified. The transcript levels in the treated biological sample are compared with levels in an untreated biological sample. Differences in the transcript levels between the two samples are indicative of a toxic response caused by the test compound in the treated sample.

[0267] Another particular embodiment relates to the use of the polypeptide sequences of the present invention to analyze the proteome of a tissue or cell type. The term proteome refers to the global pattern of protein expression in a particular tissue or cell type. Each protein component of a proteome can be subjected individually to further analysis. Proteome expression patterns, or profiles, are analyzed by quantifying the number of expressed proteins and their relative abundance under given conditions and at a given time. A profile of a cell's proteome may thus be generated by separating and analyzing the polypeptides of a particular tissue or cell type. In one embodiment, the separation is achieved using two-dimensional gel electrophoresis, in which proteins from a sample are separated by isoelectric focusing in the first dimension, and then according to molecular weight by sodium dodecyl sulfate slab gel electrophoresis in the second dimension (Steiner and Anderson, supra). The proteins are visualized in the gel as discrete and uniquely positioned spots, typically by staining the gel with an agent such as Coomassie Blue or silver or fluorescent stains. The optical density of each protein spot is generally proportional to the level of the protein in the sample. The optical densities of equivalently positioned protein spots from different samples, for example, from biological samples either treated or untreated with a test compound or therapeutic agent, are compared to identify any changes in protein spot density related to the treatment. The proteins in the spots are partially sequenced using, for example, standard methods employing chemical or enzymatic cleavage followed by mass spectrometry. The identity of the protein in a spot may be determined by comparing its partial sequence, preferably of at least 5 contiguous amino acid residues, to the polypeptide sequences of the present invention. In some cases, further sequence data may be obtained for definitive protein identification.

[0268] A proteomic profile may also be generated using antibodies specific for TRFX to quantify the levels of TRFX expression. In one embodiment, the antibodies are used as elements on a microarray, and protein expression levels are quantified by exposing the microarray to the sample and detecting the levels of protein bound to each array element (Lueking, A. et al. (1999) Anal. Biochem. 270:103-111; Mendoze, L. G. et al. (1999) Biotechniques 27:778-788). Detection may be performed by a variety of methods known in the art, for example, by reacting the proteins in the sample with a thio- or amino-reactive fluorescent compound and detecting the amount of fluorescence bound at each array element.

[0269] Toxicant signatures at the proteome level are also useful for toxicological screening, and should be analyzed in parallel with toxicant signatures at the transcript level. There is a poor correlation between transcript and protein abundances for some proteins in some tissues (Anderson, N. L. and J. Seilhamer (1997) Electrophoresis 18-533-537), so proteome toxicant signatures may be useful in the analysis of compounds which do not significantly affect the transcript image, but which alter the proteomic profile. In addition, the analysis of transcripts in body fluids is difficult, due to rapid degradation of mRNA, so proteomic profiling may be more reliable and informative in such cases.

[0270] In another embodiment, the toxicity of a test compound is assessed by treating a biological sample containing proteins with the test compound. Proteins that are expressed in the treated biological sample are separated so that the amount of each protein can be quantified. The amount of each protein is compared to the amount of the corresponding protein in an untreated biological sample. A difference in the amount of protein between the two samples is indicative of a toxic response to the test compound in the treated sample. Individual proteins are identified by sequencing the amino acid residues of the individual proteins and comparing these partial sequences to the polypeptides of the present invention.

[0271] In another embodiment, the toxicity of a test compound is assessed by treating a biological sample containing proteins with the test compound. Proteins from the biological sample are incubated with antibodies specific to the polypeptides of the present invention. The amount of protein recognized by the antibodies is quantified. The amount of protein in the treated biological sample is compared with the amount in an untreated biological sample. A difference in the amount of protein between the two samples is indicative of a toxic response to the test compound in the treated sample.

[0272] Microarrays may be prepared, used, and analyzed using methods known in the art. (See, e.g., Brennan, T. M. et al. (1995) U.S. Pat. No. 5,474,796; Schena, M. et al. (1996) Proc. Natl. Acad. Sci. USA 93:10614-10619; Baldeschweiler et al. (1995) PCT application WO95/251116; Shalon, D. et al. (1995) PCT application WO95/35505; Heller, R. A. et al. (1997) Proc. Natl. Acad. Sci. USA 94:2150-2155; and Heller, M. J. et al. (1997) U.S. Pat. No. 5,605,662.) Various types of microarrays are well known and thoroughly described in DNA Microarrays: A Practical Approach, M. Schena, ed. (1999) Oxford University Press, London, hereby expressly incorporated by reference.

[0273] In another embodiment of the invention, nucleic acid sequences encoding TRFX may be used to generate hybridization probes useful in mapping the naturally occurring genomic sequence. Either coding or noncoding sequences may be used, and in some instances, noncoding sequences may be preferable over coding sequences. For example, conservation of a coding sequence among members of a multi-gene family may potentially cause undesired cross hybridization during chromosomal mapping. The sequences may be mapped to a particular chromosome, to a specific region of a chromosome, or to artificial chromosome constructions, e.g., human artificial chromosomes (HACs), yeast artificial chromosomes (YACs), bacterial artificial chromosomes (BACs), bacterial P1 constructions, or single chromosome cDNA libraries. (See, e.g., Harrington, J. J. et al. (1997) Nat. Genet. 15:345-355; Price, C. M. (1993) Blood Rev. 7:127-134; and Trask, B. J. (1991) Trends Genet. 7:149-154.) Once mapped, the nucleic acid sequences of the invention may be used to develop genetic linkage maps, for example, which correlate the inheritance of a disease state with the inheritance of a particular chromosome region or restriction fragment length polymorphism (RFLP). (See, e.g., Lander, E. S. and D. Botstein (1986) Proc. Natl. Acad. Sci. USA 83:7353-7357.)

[0274] Fluorescent in situ hybridization (FISH) may be correlated with other physical and genetic map data. (See, e.g., Heinz-Ulrich, et al. (1995) in Meyers, supra, pp. 965-968.) Examples of genetic map data can be found in various scientific journals or at the Online Mendelian Inheritance in Man (OMIM) World Wide Web site. Correlation between the location of the gene encoding TRFX on a physical map and a specific disorder, or a predisposition to a specific disorder, may help define the region of DNA associated with that disorder and thus may further positional cloning efforts.

[0275] In situ hybridization of chromosomal preparations and physical mapping techniques, such as linkage analysis using established chromosomal markers, may be used for extending genetic maps. Often the placement of a gene on the chromosome of another mammalian species, such as mouse, may reveal associated markers even if the exact chromosomal locus is not known. This information is valuable to investigators searching for disease genes using positional cloning or other gene discovery techniques. Once the gene or genes responsible for a disease or syndrome have been crudely localized by genetic linkage to a particular genornic region, e.g., ataxia-telangiectasia to 11q22-23, any sequences mapping to that area may represent associated or regulatory genes for further investigation. (See, e.g., Gatti, R. A. et al. (1988) Nature 336:577-580.) The nucleotide sequence of the instant invention may also be used to detect differences in the chromosomal location due to translocation, inversion, etc., among normal, carrier, or affected individuals.

[0276] In another embodiment of the invention, TRFX, its catalytic or immunogenic fragments, or oligopeptides thereof can be used for screening libraries of compounds in any of a variety of drug screening techniques. The fragment employed in such screening may be free in solution, affixed to a solid support, borne on a cell surface, or located intracellularly. The formation of binding complexes between TRFX and the agent being tested may be measured.

[0277] Another technique for drug screening provides for high throughput screening of compounds having suitable binding affinity to the protein of interest. (See, e.g., Geysen, et al. (1984) PCT application WO84/03564.) In this method, large numbers of different small test compounds are synthesized on a solid substrate. The test compounds are reacted with TRFX, or fragments thereof, and washed. Bound TRFX is then detected by methods well known in the art. Purified TRFX can also be coated directly onto plates for use in the aforementioned drug screening techniques. Alternatively, non-neutralizing antibodies can be used to capture the peptide and immobilize it on a solid support.

[0278] In another embodiment, one may use competitive drug screening assays in which neutralizing antibodies capable of binding TRFX specifically compete with a test compound for binding TRFX. In this manner, antibodies can be used to detect the presence of any peptide which shares one or more antigenic determinants with TRFX.

[0279] In additional embodiments, the nucleotide sequences which encode TRFX may be used in any molecular biology techniques that have yet to be developed, provided the new techniques rely on properties of nucleotide sequences that are currently known, including, but not limited to, such properties as the triplet genetic code and specific base pair interactions.

[0280] Without further elaboration, it is believed that one skilled in the art can, using the preceding description, utilize the present invention to its fullest extent. The following preferred specific embodiments are, therefore, to be construed as merely illustrative, and not limitative of the remainder of the disclosure in any way whatsoever.

[0281] Without further elaboration, it is believed that one skilled in the art can, using the preceding description, utilize the present invention to its fullest extent. The following preferred specific embodiments are, therefore, to be construed as merely illustrative, and not limitative of the remainder of the disclosure in any way whatsoever.

[0282] The disclosures of all patents, applications, and publications mentioned above and below, in particular U.S. Ser. No. 60/188,986, are hereby expressly incorporated by reference.

### EXAMPLES

[0283] I. Construction of cDNA Libraries

[0284] RNA was purchased from Clontech or isolated from tissues described in Table 4. Some tissues were homogenized and lysed in guanidinium isothiocyanate, while others were homogenized and lysed in phenol or in a suitable mixture of denaturants, such as TRIZOL (Life Technologies), a monophasic solution of phenol and guanidine isothiocyanate. The resulting lysates were centrifuged over CsCl cushions or extracted with chloroform. RNA was precipitated from the lysates with either isopropanol or sodium acetate and ethanol, or by other routine methods.

[0285] Phenol extraction and precipitation of RNA were repeated as necessary to increase RNA purity. In some cases, RNA was treated with DNase. For most libraries, poly(A+) RNA was isolated using oligo d(T)coupled paramagnetic particles (Promega), OLIGOTEX latex particles (QIAGEN, Chatsworth Calif.), or an OLIGOTEX mRNA purification kit (QIAGEN). Alternatively, RNA was isolated directly from tissue lysates using other RNA isolation kits, e.g., the POLY(A)PURE mRNA purification kit (Ambion, Austin Tex.).

[0286] In some cases, Stratagene was provided with RNA and constructed the corresponding cDNA libraries. Otherwise, cDNA was synthesized and cDNA libraries were constructed with the UNIZAP vector system (Stratagene) or SUPERSCRIPT plasmid system (Life Technologies), using the recommended procedures or similar methods known in the art. (See, e.g., Ausubel, 1997, supra, units 5.1-6.6.) Reverse transcription was initiated using oligo d(T) or random primers. Synthetic oligonucleotide adapters were ligated to double stranded cDNA, and the cDNA was digested with the appropriate restriction enzyme or enzymes. For most libraries, the cDNA was size-selected (300-1000 bp) using SEPHACRYL S1000, SEPHAROSE CL2B, or SEPHAROSE CL4B column chromatography (Amersham Pharmacia Biotech) or preparative agarose gel electrophoresis. cDNAs were ligated into compatible restriction enzyme sites of the polylinker of a suitable plasmid, e.g., PBLUESCRIPT plasmid (Stratagene), PSPORT1 plasmid (Life Technologies), pcDNA2.1 plasmid (Invitrogen, Carlsbad Calif.), or pINCY plasmid (Incyte Genomics, Palo Alto Calif.). Recombinant plasmids were transformed into competent E. coli cells including XL1-Blue, XL1-BlueMRF, or SOLR from Stratagene or DH5α, DH10B, or ElectroMAX DH10B from Life Technologies.

[0287] II. Isolation of cDNA Clones

[0288] Plasmids obtained as described in Example I were recovered from host cells by in vivo excision using the UNIZAP vector system (Stratagene) or by cell lysis. Plasmids were purified using at least one of the following: a Magic or WIARD Minipreps DNA purification system (Promega); an AGTC Miniprep purification kit (Edge Biosystems, Gaithersburg Md.); and QIAWELL 8 Plasmid, QIAWELL 8 Plus Plasmid, QIAWELL 8 Ultra Plasmid purification systems or the R.E.AL. PREP 96 plasmid purification kit from QIAGEN. Following precipitation, plasmids were resuspended in 0.1 ml of distilled water and stored, with or without lyophilization, at 4° C.

[0289] Alternatively, plasmid DNA was amplified from host cell lysates using direct link PCR in a high-throughput format (Rao, V. B. (1994) Anal. Biochem. 216:1-14). Host cell lysis and thermal cycling steps were carried out in a single reaction mixture. Samples were processed and stored in 384 well plates, and the concentration of amplified plasmid DNA was quantified fluorometrically using PICOGREEN dye (Molecular Probes, Eugene Oreg.) and a FLUOROSKAN II fluorescence scanner (Labsystems Oy, Helsinki, Finland).

[0290] III. Sequencing and Analysis

[0291] Incyte cDNA recovered in plasmids as described in Example II were sequenced as follows. Sequencing reactions were processed using standard methods or high-throughput instrumentation such as the ABI CATALYST 800 (Applied Biosystems) thermal cycler or the PTC-200 thermal cycler (MJ Research) in conjunction with the HYDRA microdispenser (Robbins Scientific) or the MICROLAB 2200 (Hamilton) liquid transfer system. cDNA sequencing reactions were prepared using reagents provided by Amersham Pharmacia Biotech or supplied in ABI sequencing kits such as the ABI PRISM BIGDYE Terminator cycle sequencing ready reaction kit (Applied Biosystems). Electrophoretic separation of cDNA sequencing reactions and detection of labeled polynucleotides were carried out using the MEGABACE 1000 DNA sequencing system (Molecular Dynamics); the ABI PRISM 373 or 377 sequencing system (Applied Biosystems) in conjunction with standard ABI protocols and base calling software; or other sequence analysis systems known in the art. Reading frames within the cDNA sequences were identified using standard methods (reviewed in Ausubel, 1997, supra, unit 7.7). Some of the cDNA sequences were selected for extension using the techniques disclosed in Example VI.

[0292] The polynucleotide sequences derived from cDNA sequencing were assembled and analyzed using a combination of software programs which utilize algorithms well known to those skilled in the art. Table 5 summarizes the tools, programs, and algorithms used and provides applicable descriptions, references, and threshold parameters. The first column of Table 5 shows the tools, programs, and algorithms used, the second column provides brief descriptions thereof, the third column presents appropriate references, all of which are incorporated by reference herein in their entirety, and the fourth column presents, where applicable, the scores, probability values, and other parameters used to evaluate the strength of a match between two sequences (the higher the score, the greater the homology between two sequences). Sequences were analyzed using MAcDNASIS PRO software (Hitachi Software Engineering, South San Francisco Calif.) and LASERGENE software (DNASTAR). Polynucleotide and polypeptide sequence alignments were generated using the default parameters specified by the clustal algorithm as incorporated into the MEGALIGN multisequence alignment program (DNASTAR), which also calculates the percent identity between aligned sequences.

[0293] The polynucleotide sequences were validated by removing vector, linker, and polyA sequences and by masking ambiguous bases, using algorithms and programs based on BLAST, dynamic programing, and dinucleotide nearest neighbor analysis. The sequences were then queried against a selection of public databases such as the GenBank primate, rodent, mammalian, vertebrate, and eukaryote databases, and BLOCKS, PRINTS, DOMO, PRODOM, and PFAM to acquire annotation using programs based on BLAST, FASTA, and BUMPS. The sequences were assembled into fill length polynucleotide sequences using programs based on Phred, Phrap, and Consed, and were screened for open reading frames using programs based on GeneMark, BLAST, and FASTA. The full length polynucleotide sequences were translated to derive the corresponding full length amino acid sequences, and these full length sequences were subsequently analyzed by querying against databases such as the GenBank databases (described above), SwissProt, BLOCKS, PRINTS, DOMO, PRODOM, Prosite, and Hidden Markov Model (HMM)-based protein family databases such as PFAM. HMM is a probabilistic approach which analyzes consensus primary structures of gene families. (See, e.g., Eddy, S. R. (1996) Curr. Opin. Struct. Biol. 6:361-365.)

[0294] The programs described above for the assembly and analysis of full length polynucleotide and amino acid sequences were also used to identify polynucleotide sequence fragments from SEQ ID NO:108-214. Fragments from about 20 to about 4000 nucleotides which are useful in hybridization and amplification technologies were described in The Invention section above.

[0295] IV. Analysis of Polynucleotide Expression

[0296] Northern analysis is a laboratory technique used to detect the presence of a transcript of a gene and involves the hybridization of a labeled nucleotide sequence to a membrane on which RNAs from a particular cell type or tissue have been bound. (See, e.g., Sambrook, supra, ch. 7; Ausubel, 1995, supra, ch. 4 and 16.)

[0297] Analogous computer techniques applying BLAST were used to search for identical or related molecules in cDNA databases such as GenBank or LIFESEQ (Incyte Genomics). This analysis is much faster than multiple membrane-based hybridizations. In addition, the sensitivity of the computer search can be modified to determine whether any particular match is categorized as exact or similar. The basis of the search is the product score, which is defined as:

$$\frac{BLAST Score \times Percent Identity}{5 \times minimum \{ length ( Seq .1 ) , length ( Seq .2 ) \}}$$

[0298] The product score takes into account both the degree of similarity between two sequences and the length of the sequence match. The product score is a normalized value between 0 and 100, and is calculated as follows: the BLAST score is multiplied by the percent nucleotide identity and the product is divided by (5 times the length of the shorter of the two sequences). The BLAST score is calculated by assigning a score of +5 for every base that matches in a high-scoring segment pair (HSP), and 4 for every mismatch. Two sequences may share more than one HSP (separated by gaps). If there is more than one HSP, then the pair with the highest BLAST score is used to calculate the product score. The product score represents a balance between fractional overlap and quality in a BLAST alignment. For example, a product score of 100 is produced only for 100% identity over the entire length of the shorter of the two sequences being compared. A product score of 70 is produced either by 100% identity and 70% overlap at one end, or by 88% identity and 100% overlap at the other. A product score of 50 is produced either by 100% identity and 50% overlap at one end, or 79% identity and 100% overlap.

[0299] The results of northern analyses are reported as a percentage distribution of libraries in which the transcript encoding TRFX occurred. Analysis involved the categorization of cDNA libraries by organ/tissue and disease. The organ/tissue categories included cardiovascular, dermatologic, developmental, endocrine, gastrointestinal, hematopoietic/immune, musculoskeletal, nervous, reproductive, and urologic. The disease/condition categories included cancer, inflammation, trauma, cell proliferation, neurological, and pooled. For each category, the number of libraries expressing the sequence of interest was counted and divided by the total number of libraries across all categories. Percentage values of tissue-specific and disease- or condition-specific expression are reported in Table 3.

[0300] V. Chromosomal Mapping of TRFX Encoding Polynucleotides

[0301] The cDNA sequences which were used to assemble SEQ ID NO:108-214 were compared with sequences from the Incyte LIFESEQ database and public domain databases using BLAST and other implementations of the Smith-Waterman algorithm. Sequences from these databases that matched SEQ ID NO:108-214 were assembled into clusters of contiguous and overlapping sequences using assembly algorithms such as Phrap (Table 5). Radiation hybrid and genetic mapping data available from public resources such as the Stanford Human Genome Center (SHGC), Whitehead Institute for Genome Research (WIGR), and Généthon were used to determine if any of the clustered sequences had been previously mapped. Inclusion of a mapped sequence in a cluster resulted in the assignment of all sequences of that cluster, including its particular SEQ ID NO:, to that map location.

[0302] The genetic map locations of SEQ ID NO:111, 114, 117, 122, 123, 125, 130, 132-134, 136, 138, 145, 149, 152, 153, 156, 159, 168, 179, 180, 184, 185, 196, 197, 199, 201, 204, 208, 212, and 213, are described in The Invention as ranges, or intervals, of human chromosomes. More than one map location is reported for SEQ ID NO:145, 152, 184, 185, 199, 208, and 212, indicating that previously mapped sequences having similarity, but not complete identity, to SEQ ID NO:145, 152, 184, 185, 199, 208, and 212 were assembled into their respective clusters. The map position of an interval, in centiMorgans, is measured relative to the terminus of the chromosome's p-arm. (The centiMorgan (cM) is a unit of measurement based on recombination frequencies between chromosomal markers. On average, 1 cM is roughly equivalent to 1 megabase (Mb) of DNA in humans, although this can vary widely due to hot and cold spots of recombination.) The cM distances are based on genetic markers mapped by Généthon which provide boundaries for radiation hybrid markers whose sequences were included in each of the clusters. Human genome maps and other resources available to the public, such as the NCBI “GeneMap'99” World Wide Web site (http://www.ncbi.nlm.nih.gov/genemap/), can be employed to determine if previously identified disease genes map within or in proximity to the intervals indicated above.

[0303] VI. Extension of TRFX Encoding Polynucleotides

[0304] The full length nucleic acid sequences of SEQ ID NO:108-214 were produced by extension of an appropriate fragment of the full length molecule using oligonucleotide primers designed from this fragment. One primer was synthesized to initiate 5′ extension of the known fragment, and the other primer, to initiate 3′ extension of the known fragment. The initial primers were designed using OLIGO 4.06 software (National Biosciences), or another appropriate program, to be about 22 to 30 nucleotides in length, to have a GC content of about 50% or more, and to anneal to the target sequence at temperatures of about 68° C. to about 72° C. Any stretch of nucleotides which would result in hairpin structures and primer-priner dimerizations was avoided.

[0305] Selected human cDNA libraries were used to extend the sequence. If more than one extension was necessary or desired, additional or nested sets of primers were designed.

[0306] High fidelity amplification was obtained by PCR using methods well known in the art. PCR was performed in 96-well plates using the PTC-200 thermal cycler (MJ Research, Inc.). The reaction mix contained DNA template, 200 nmol of each primer, reaction buffer containing Mg²⁺, (NH₄)₂SO₄, and β-mercaptoethanol, Taq DNA polymerase (Amersham Pharmacia Biotech), ELONGASE enzyme (Life Technologies), and Pfu DNA polymerase (Stratagene), with the following parameters for primer pair PCI A and PCI B: Step 1: 94° C., 3 min; Step 2: 94° C., 15 sec; Step 3: 60° C., 1 min; Step 4: 68° C., 2 min; Step 5: Steps 2, 3, and 4 repeated 20 times; Step 6: 68° C., 5 min; Step 7: storage at 4° C. In the alternative, the parameters for primer pair T7 and SK+ were as follows: Step 1: 94° C., 3 min; Step 2: 94° C., 15 sec; Step 3: 57° C., 1 min; Step 4: 68° C., 2 min; Step 5: Steps 2, 3, and 4 repeated 20 times; Step 6: 68° C., 5 min; Step 7: storage at 4° C.

[0307] The concentration of DNA in each well was determined by dispensing 100 μl PICOGREEN quantitation reagent (0.25% (v/v) PICOGREEN; Molecular Probes, Eugene Oreg.) dissolved in 1×TE and 0.5 μl of undiluted PCR product into each well of an opaque fluorimeter plate (Corning Costar, Acton Mass.), allowing the DNA to bind to the reagent. The plate was scanned in a Fluoroskan II (Labsystems Oy, Helsinki, Finland) to measure the fluorescence of the sample and to quantify the concentration of DNA. A 5 μl to 10 μl aliquot of the reaction mixture was analyzed by electrophoresis on a 1% agarose mini-gel to determine which reactions were successful in extending the sequence.

[0308] The extended nucleotides were desalted and concentrated, transferred to 384-well plates, digested with CviJI cholera virus endonuclease (Molecular Biology Research, Madison Wis.), and sonicated or sheared prior to religation into pUC 18 vector (Amersham Pharmacia Biotech). For shotgun sequencing, the digested nucleotides were separated on low concentration (0.6 to 0.8%) agarose gels, fragments were excised, and agar digested with Agar ACE (Promega). Extended clones were religated using T4 ligase (New England Biolabs, Beverly Mass.) into pUC 18 vector (Amersham Phanracia Biotech), treated with Pfu DNA polymerase (Stratagene) to fill-in restriction site overhangs, and transfected into competent E. coli cells. Transformed cells were selected on antibiotic-containing media, and individual colonies were picked and cultured overnight at 37° C. in 384-well plates in LB/2× carb liquid media.

[0309] The cells were lysed, and DNA was amplified by PCR using Taq DNA polymerase (Amersham Pharmacia Biotech) and Pfu DNA polymerase (Stratagene) with the following parameters: Step 1: 94° C., 3 min; Step 2: 94° C., 15 sec; Step 3: 60° C., 1 min; Step 4: 72° C., 2 min; Step 5: steps 2, 3, and 4 repeated 29 times; Step 6: 72° C., 5 min; Step 7: storage at 4° C. DNA was quantified by PICOGREEN reagent (Molecular Probes) as described above. Samples with low DNA recoveries were reamplified using the same conditions as described above. Samples were diluted with 20% dimethysulfoxide (1:2, v/v), and sequenced using DYENAMIC energy transfer sequencing primers and the DYENAMIC DIRECT kit (Amersham Pharmacia Biotech) or the ABI PRISM BIGDYE Terminator cycle sequencing ready reaction kit (Applied Biosystems).

[0310] In like manner, the polynucleotide sequences of SEQ ID NO:108-214 are used to obtain 5′ regulatory sequences using the procedure above, along with oligonucleotides designed for such extension, and an appropriate genomic library.

[0311] VII. Labeling and Use of Individual Hybridization Probes

[0312] Hybridization probes derived from SEQ ID NO:108-214 are employed to screen cDNAs, genomic DNAs, or mRNAs. Although the labeling of oligonucleotides, consisting of about 20 base pairs, is specifically described, essentially the same procedure is used with larger nucleotide fragments. Oligonucleotides are designed using state-of-the-art software such as OLIGO 4.06 software (National Biosciences) and labeled by combining 50 pmol of each oligomer, 250 μCi of [γ-³²P] adenosine triphosphate (Amersham Pharmacia Biotech), and T4 polynucleotide kinase (DuPont NEN, Boston Mass.). The labeled oligonucleotides are substantially purified using a SEPHADEX G-25 superfime size exclusion dextran bead column (Amersham Pharmacia Biotech). An aliquot containing 10⁷ counts per minute of the labeled probe is used in a typical membrane-based hybridization analysis of human genomic DNA digested with one of the following endonucleases: Ase I, Bgl II, Eco RI, Pst I, Xba I, or Pvu II (DuPont NEN).

[0313] The DNA from each digest is fractionated on a 0.7% agarose gel and transferred to nylon membranes (Nytran Plus, Schleicher & Schuell, Durham N.H.). Hybridization is carried out for 16 hours at 40° C. To remove nonspecific signals, blots are sequentially washed at room temperature under conditions of up to, for example, 0.1× saline sodium citrate and 0.5% sodium dodecyl sulfate. Hybridization patterns are visualized using autoradiography or an alternative imaging means and compared.

[0314] VIII. Microarrays

[0315] The linkage or synthesis of array elements upon a microarray can be achieved utilizing photolithography, piezoelectric printing (ink-jet printing, See, e.g., Baldeschweiler, supra), mechanical microspotting technologies, and derivatives thereof. The substrate in each of the aforementioned technologies should be uniform and solid with a non-porous surface (Schena (1999), supra). Suggested substrates include silicon, silica, glass slides, glass chips, and silicon wafers. Alternatively, a procedure analogous to a dot or slot blot may also be used to arrange and link elements to the surface of a substrate using thermal, UV, chemical, or mechanical bonding procedures. A typical array may be produced using available methods and machines well known to those of ordinary skill in the art and may contain any appropriate number of elements. (See, e.g., Schena, M. et al. (1995) Science 270:467-470; Shalon, D. et al. (1996) Genome Res. 6:639-645; Marshall, A. and J. Hodgson (1998) Nat. Biotechnol. 16:27-31.)

[0316] Full length cDNAs, Expressed Sequence Tags (ESTs), or fragments or oligomers thereof may comprise the elements of the microarray. Fragments or oligomers suitable for hybridization can be selected using software well known in the art such as LASERGENE software (DNASTAR). The array elements are hybridized with polynucleotides in a biological sample. The polynucleotides in the biological sample are conjugated to a fluorescent label or other molecular tag for ease of detection. After hybridization, nonhybridized nucleotides from the biological sample are removed, and a fluorescence scanner is used to detect hybridization at each array element. Alternatively, laser desorbtion and mass spectrometry may be used for detection of hybridization. The degree of complementarity and the relative abundance of each polynucleotide which hybridizes to an element on the microarray may be assessed. In one embodiment, microarray preparation and usage is described in detail below.

[0317] Tissue or Cell Sample Preparation

[0318] Total RNA is isolated from tissue samples using the guanidinium thiocyanate method and poly(A)⁺ RNA is purified using the oligo-(dT) cellulose method. Each poly(A)⁺ RNA sample is reverse transcribed using MMLV reverse-transcriptase, 0.05 pg/μl oligo-(dT) primer (21mer), 1× first strand buffer, 0.03 units/μl RNase inhibitor, 500 μM DATP, 500 μM dGTP, 500 μM dTTP, 40 μM dCTP, 40 μM dCTP-Cy3 (BDS) or dCTP-Cy5 (Amersham Pharmacia Biotech). The reverse transcription reaction is performed in a 25 ml volume containing 200 ng poly(A)⁺ RNA with GEMBRIGHT kits (Incyte). Specific control poly(A)⁺ RNAs are synthesized by in vitro transcription from non-coding yeast genomic DNA. After incubation at 37° C. for 2 hr, each reaction sample (one with Cy3 and another with Cy5 labeling) is treated with 2.5 ml of 0.5M sodium hydroxide and incubated for 20 minutes at 85° C. to the stop the reaction and degrade the RNA. Samples are purified using two successive CHROMA SPIN 30 gel filtration spin columns (CLONTECH Laboratories, Inc. (CLONTICH), Palo Alto Calif.) and after combining, both reaction samples are ethanol precipitated using 1 ml of glycogen (1 mg/ml), 60 ml sodium acetate, and 300 ml of 100% ethanol. The sample is then dried to completion using a SpeedVAC (Savant Instruments Inc., Holbrook N.Y.) and resuspended in 14 μl 5×SSC/0.2% SDS.

[0319] Microarray Preparation

[0320] Sequences of the present invention are used to generate array elements. Each array element is amplified from bacterial cells containing vectors with cloned cDNA inserts. PCR amplification uses primers complementary to the vector sequences flanking the cDNA insert. Array elements are amplified in thirty cycles of PCR from an initial quantity of 1-2 ng to a final quantity greater than 5 μg. Amplified array elements are then purified using SEPHACRYL-400 (Amersham Pharmacia Biotech).

[0321] Purified array elements are immobilized on polymer-coated glass slides. Glass microscope slides (Corning) are cleaned by ultrasound in 0.1% SDS and acetone, with extensive distilled water washes between and after treatments. Glass slides are etched in 4% hydrofluoric acid (VWR Scientific Products Corporation (VWR), West Chester Pa.), washed extensively in distilled water, and coated with 0.05% aminopropyl silane (Sigma) in 95% ethanol. Coated slides are cured in a 110° C. oven.

[0322] Array elements are applied to the coated glass substrate using a procedure described in U.S. Pat. No. 5,807,522, incorporated herein by reference. 1 μl of the array element DNA, at an average concentration of 100 ng/μl, is loaded into the open capillary printing element by a high-speed robotic apparatus. The apparatus then deposits about 5 nl of array element sample per slide.

[0323] Microarrays are UV-crossllnked using a STRATALINER UV-crosslinker (Stratagene). Microarrays are washed at room temperature once in 0.2% SDS and three times in distilled water. Non-specific binding sites are blocked by incubation of microarrays in 0.2% casein in phosphate buffered saline (PBS) (Tropix, Inc., Bedford Mass.) for 30 minutes at 60° C. followed by washes in 0.2% SDS and distilled water as before.

[0324] Hybridization

[0325] Hybridization reactions contain 9 μl of sample mixture consisting of 0.2 μg each of Cy3 and Cy5 labeled cDNA synthesis products in 5×SSC, 0.2% SDS hybridization buffer. The sample mixture is heated to 65° C. for 5 minutes and is aliquoted onto the microarray surface and covered with an 1.8 cm² coverslip. The arrays are transferred to a waterproof chamber having a cavity just slightly larger than a microscope slide. The chamber is kept at 100% humidity internally by the addition of 140 μl of 5×SSC in a corner of the chamber. The chamber containing the arrays is incubated for about 6.5 hours at 60° C. The arrays are washed for 10 min at 45° C. in a first wash buffer (1×SSC, 0.1% SDS), three times for 10 minutes each at 45° C. in a second wash buffer (0.1×SSC), and dried.

[0326] Detection

[0327] Reporter-labeled hybridization complexes are detected with a microscope equipped with an Innova 70 mixed gas 10 W laser (Coherent, Inc., Santa Clara Calif.) capable of generating spectral lines at 488 nm for excitation of Cy3 and at 632 nm for excitation of CyS. The excitation laser light is focused on the array using a 20× microscope objective (Nikon, Inc., Melville N.Y.). The slide containing the array is placed on a computer-controlled X-Y stage on the microscope and raster-scanned past the objective. The 1.8 cm×1.8 cm array used in the present example is scanned with a resolution of 20 micrometers.

[0328] In two separate scans, a mixed gas multiline laser excites the two fluorophores sequentially. Emitted light is split, based on wavelength, into two photomultiplier tube detectors (PMT R1477, Hamamatsu Photonics Systems, Bridgewater N.J.) corresponding to the two fluorophores. Appropriate filters positioned between the array and the photomultiplier tubes are used to filter the signals. The emission maxima of the fluorophores used are 565 nm for Cy3 and 650 nm for Cy5. Each array is typically scanned twice, one scan per fluorophore using the appropriate filters at the laser source, although the apparatus is capable of recording the spectra from both fluorophores simultaneously.

[0329] The sensitivity of the scans is typically calibrated using the signal intensity generated by a cDNA control species added to the sample mixture at a known concentration. A specific location on the array contains a complementary DNA sequence, allowing the intensity of the signal at that location to be correlated with a weight ratio of hybridizing species of 1:100,000. When two samples from different sources (e.g., representing test and control cells), each labeled with a different fluorophore, are hybridized to a single array for the purpose of identifying genes that are differentially expressed, the calibration is done by labeling samples of the calibrating cDNA with the two fluorophores and adding identical amounts of each to the hybridization mixture.

[0330] The output of the photomultiplier tube is digitized using a 12-bit Rn-835H analog-to-digital (A/D) conversion board (Analog Devices, Inc., Norwood Mass.) installed in an IBM-compatible PC computer. The digitized data are displayed as an image where the signal intensity is mapped using a linear 20-color transformation to a pseudocolor scale ranging from blue (low signal) to red (high signal). The data is also analyzed quantitatively. Where two different fluorophores are excited and measured simultaneously, the data are first corrected for optical crosstalk (due to overlapping emission spectra) between the fluorophores using each fluorophore's emission spectrum.

[0331] A grid is superimposed over the fluorescence signal image such that the signal from each spot is centered in each element of the grid. The fluorescence signal within each element is then integrated to obtain a numerical value corresponding to the average intensity of the signal. The software used for signal analysis is the GEMTOOLS gene expression analysis program (Incyte).

[0332] IX. Complementary Polynucleotides

[0333] Sequences complementary to the TRFX-encoding sequences, or any parts thereof, are used to detect, decrease, or inhibit expression of naturally occurring TRFX. Although use of oligonucleotides comprising from about 15 to 30 base pairs is described, essentially the same procedure is used with smaller or with larger sequence fragments. Appropriate oligonucleotides are designed using OLIGO 4.06 software (National Biosciences) and the coding sequence of TRFX. To inhibit transcription, a complementary oligonucleotide is designed from the most unique 5′ sequence and used to prevent promoter binding to the coding sequence. To inhibit translation, a complementary oligonucleotide is designed to prevent ribosomal binding to the TRFX-encoding transcript.

[0334] X. Expression of TRFX

[0335] Expression and purification of TRFX is achieved using bacterial or virus-based expression systems. For expression of TRFX in bacteria, cDNA is subcloned into an appropriate vector containing an antibiotic resistance gene and an inducible promoter that directs high levels of cDNA transcription. Examples of such promoters include, but are not limited to, the trp-lac (tac) hybrid promoter and the T5 or T7 bacteriophage promoter in conjunction with the lac operator regulatory element. Recombinant vectors are transformed into suitable bacterial hosts, e.g., BL21(DE3). Antibiotic resistant bacteria express TRFX upon induction with isopropyl beta-D-thiogalactopyranoside (IPTG). Expression of TRFX in eukaryotic cells is achieved by infecting insect or mammalian cell lines with recombinant Autographica californica nuclear polyhedrosis virus (AcMNPV), commonly known as baculovirus. The nonessential polyhedrin gene of baculovirus is replaced with cDNA encoding TRFX by either homologous recombination or bacterial-mediated transposition involving transfer plasmid intermediates. Viral infectivity is maintained and the strong polyhedrin promoter drives high levels of cDNA transcription. Recombinant baculovirus is used to infect Spodoptera frugirerda (Sf9) insect cells in most cases, or human hepatocytes, in some cases. Infection of the latter requires additional genetic modifications to baculovirus. (See Engelhard, E. K. et al. (1994) Proc. Natl. Acad. Sci. USA 91:3224-3227; Sandig, V. et al. (1996) Hum. Gene Ther. 7:1937-1945.)

[0336] In most expression systems, TRFX is synthesized as a fusion protein with, e.g., glutathione S-transferase (GST) or a peptide epitope tag, such as FLAG or 6-His, permitting rapid, single-step, affinity-based purification of recombinant fusion protein from crude cell lysates. GST, a 26-kilodalton enzyme from Schistosoma iaponicum, enables the purification of fusion proteins on immobilized glutathione under conditions that maintain protein activity and antigenicity (Amersham Pharmacia Biotech). Following purification, the GST moiety can be proteolytically cleaved from TRFX at specifically engineered sites. FLAG, an 8-amino acid peptide, enables immunoaffinity purification using commercially available monoclonal and polyclonal anti-FLAG antibodies (Eastman Kodak). 6-His, a stretch of six consecutive histidine residues, enables purification on metal-chelate resins (QIAGEN). Methods for protein expression and purification are discussed in Ausubel (1995, supra, ch. 10 and 16). Purified TRFX obtained by these methods can be used directly in the assays shown in Examples XI and XV.

[0337] XI. Demonstration of TRFX Activity

[0338] TRFX activity is measured by its ability to stimulate transcription of a reporter gene (Liu, H. Y. et al. (1997) EMBO J. 16(17):5289-5298). The assay entails the use of a well characterized reporter gene construct, LexAₒₚ-LacZ, that consists of LexA DNA transcriptional control elements (Lex) fused to sequences encoding the E. coli LacZ enzyme. The methods for constructing and expressing fusion genes, introducing them into cells, and measuring LacZ enzyme activity, are well known to those skilled in the art. Sequences encoding TRFX are cloned into a plasmid that directs the synthesis of a fusion protein, LexA-TRFX, consisting of TRFX and a DNA binding domain derived from the LexA transcription factor. The resulting plasmid, encoding a LexA-TRFX fusion protein, is introduced into yeast cells along with a plasmid containing the LexAₒₚ-LacZ reporter gene. The amount of LacZ enzyme activity associated with LexA-TRFX transfected cells, relative to control cells, is proportional to the amount of transcription stimulated by the TRFX.

[0339] XII. Functional Assays

[0340] TRFX function is assessed by expressing the sequences encoding TRFX at physiologically elevated levels in mammalian cell culture systems. cDNA is subcloned into a mammalian expression vector containing a strong promoter that drives high levels of cDNA expression. Vectors of choice include pCMV SPORT plasmid (Life Technologies) and pCR3.1 plasmid (Invitrogen), both of which contain the cytomegalovirus promoter. 5-10 μg of recombinant vector are transiently transfected into a human cell line, for example, an endothelial or hematopoietic cell line, using either liposome, formulations or electroporation. 1-2 μg of an additional plasmid containing sequences encoding a marker protein are co-transfected. Expression of a marker protein provides a means to distinguish transfected cells from nontransfected cells and is a reliable predictor of cDNA expression from the recombinant vector. Marker proteins of choice include, e.g., Green Fluorescent Protein (GFP; Clontech), CD64, or a CD64GFP fusion protein. Flow cytometry (FCM), an automated, laser optics-based technique, is used to identify transfected cells expressing GFP or CD64GFP and to evaluate the apoptotic state of the cells and other cellular properties. FCM detects and quantifies the uptake of fluorescent molecules that diagnose events preceding or coincident with cell death. These events include changes in nuclear DNA content as measured by staining of DNA with propidium iodide; changes in cell size and granularity as measured by forward light scatter and 90 degree side light scatter; down-regulaiion of DNA synthesis as measured by decrease in bromodeoxyuridine uptake; alterations in expression of cell surface and intracellular proteins as measured by reactivity with specific antibodies; and alterations in plasma membrane composition as measured by the binding of fluorescein-conjugated Annexin V protein to the cell surface. Methods in flow cytometry are discussed in Ormerod, M. G. (1994) Flow Cytometry, Oxford, New York N.Y.

[0341] The influence of TRFX on gene expression can be assessed using highly purified populations of cells transfected with sequences encoding TRFX and either CD64 or CD64GFP. CD64 and CD64-GFP are expressed on the surface of transfected cells and bind to conserved regions of human immunoglobulin G (IgG). Transfected cells are efficiently separated from nontransfected cells using magnetic beads coated with either human IgG or antibody against CD64 (DYNAL, Lake Success N.Y.). mRNA can be purified from the cells using methods well known by those of skill in the art. Expression of mRNA encoding TRFX and other genes of interest can be analyzed by northern analysis or microarray techniques.

[0342] XIII. Production of TRFX Specific Antibodies

[0343] TRFX substantially purified using polyacrylamide gel electrophoresis (PAGE; see, e.g., Harrington, M. G. (1990) Methods Enzymol. 182:488495), or other purification techniques, is used to immunize rabbits and to produce antibodies using standard protocols.

[0344] Alternatively, the TRFX amino acid sequence is analyzed using LASERGENE software (DNASTAR) to determine regions of high immunogenicity, and a corresponding oligopeptide is synthesized and used to raise antibodies by means known to those of skill in the art. Methods for selection of appropriate epitopes, such as those near the C-terminus or in hydrophilic regions are well described in the art. (See, e.g., Ausubel, 1995, supra, ch. 11.)

[0345] Typically, oligopeptides of about 15 residues in length are synthesized using an ABI 431A peptide synthesizer (Applied Biosystems) using FMOC chemistry and coupled to KLH (Sigma-Aldrich, St. Louis Mo.) by reaction with N-maleimidobenwyl-N-hydroxysuccinimide ester (MBS) to increase immunogenicity. (See, e.g., Ausubel, 1995, surra.) Rabbits are immunized with the oligopeptide-KLH complex in complete Freund's adjuvant. Resulting antisera are tested for antipeptide and anti-TRFX activity by, for example, binding the peptide or TRFX to a substrate, blocking with 1% BSA, reacting with rabbit antisera, washing, and reacting with radio-iodinated goat anti-rabbit IgG.

[0346] XIV. Purification of Naturally Occurring TREX Using Specific Antibodies

[0347] Naturally occurring or recombinant TRFX is substantially purified by immunoaffinity chromatography using antibodies specific for TRFX. An immunoaffinity column is constructed by covalently coupling anti-TRFX antibody to an activated chromatographic resin, such as CNBr-activated SEPHAROSE (Amersham Pharmacia Biotech). After the coupling, the resin is blocked and washed according to the manufacturer's instructions.

[0348] Media containing TRFX are passed over the immunoaffinity column, and the column is washed under conditions that allow the preferential absorbance of TRFX (e.g., high ionic strength buffers in the presence of detergent). The column is eluted under conditions that disrupt antibody/TRFX binding (e.g., a buffer of pH 2 to pH 3, or a high concentration of a chaotrope, such as urea or thiocyanate ion), and TRFX is collected.

[0349] XV. Identification of Molecules which Interact with TRFX

[0350] TRFX, or biologically active fragments thereof, are labeled with ¹²⁵I Bolton-Hunter reagent. (See, e.g., Bolton A. E. and W. M. Hunter (1973) Biochem. J. 133:529-539.) Candidate molecules previously arrayed in the wells of a multi-well plate are incubated with the labeled TRFX, washed, and any wells with labeled TRFX complex are assayed. Data obtained using different concentrations of TRFX are used to calculate values for the number, affinity, and association of TREX with the candidate molecules.

[0351] Alternatively, molecules interacting with TRFX are analyzed using the yeast two-hybrid system as described in Fields, S. and 0. Song (1989, Nature 340:245-246), or using commercially available kits based on the two-hybrid system, such as the MATCH ER system (Clontech).

[0352] TRFX may also be used in the PATHCAILING process (CuraGen Corp., New Haven Conn.) which employs the yeast two-hybrid system in a high-throughput manner to determine all interactions between the proteins encoded by two large libraries of genes (Nandabalan, K. et al. (2000) U.S. Pat. No. 6,057,101).

[0353] Various modifications and variations of the described methods and systems of the invention will be apparent to those skilled in the art without departing from the scope and spirit of the invention. Although the invention has been described in connection with certain embodiments, it should be understood that the invention as claimed should not be unduly limited to such specific embodiments. Indeed, various modifications of the described modes for carrying out the invention which are obvious to those skilled in molecular biology or related fields are intended to be within the scope of the following claims.

TABLE 1

| Polypeptide | Nucleotide | Clone | | |
|---|---|---|---|---|
| SEQ ID NO: | SEQ ID NO: | ID | Library | Fragments |
| 1 | 108 | 095210 | PITUNOT01 | 095210H1 (PITUNOT01), 095210R1 (PITUNOT01), 450088R1 (TLYMNOT02), |
| | | | | 1405954F6 (LATRTUT02), 1676067F6 (BLADNOT05), 3421076H1 (UCMCNOT04), |
| | | | | 3519949H1 (LUNGNON03), 3535670H1 (KIDNNOT25) |
| 2 | 109 | 157953 | THP1PLB02 | 157953F1 (THP1PLB02), 157953H1 (THP1PLB02), 279935H1 (LIVRNOT02), |
| | | | | 293820X24 (LIVRNOT04), 1210577R7 (BRSTNOT02), 2563416H1 (ADRETUT01), |
| | | | | 5049562H1 (BRSTNOT33), g678942 |
| 3 | 110 | 159196 | ADENINB01 | 159196H1 (ADENINB01), 873479R1 (LUNGAST01), 1695224F6 (COLNNOT23), |
| | | | | 4408025F6 (PROSDIT01), 4663865T6 (MEGBUNT01) |
| 4 | 111 | 343338 | THYMNOT02 | 343338H1 (THYMNOT02), 343338R6 (THYMNOT02), 343338T6 (THYMNOT02), |
| | | | | 1448112F6 (PLACNOT02), 1448112R1 (PLACNOT02), 2235177X14F1 (PANCTUT02), |
| | | | | 2235177X16F1 (PANCTUT02), 2235177X17F1 (PANCTUT02), 2241778F6 |
| | | | | (PANCTUT02), 2241778T6 (PANCTUT02), 2729457F6 (OVARTUT05), 4053846F6 |
| | | | | (SPLNNOT13), SBCA04252F1 |
| 5 | 112 | 402386 | TMLR3DT01 | 402386H1 (TMLR3DT01), 402386X11 (TMLR3DT01), 568243R1 (MMLR3DT01), |
| | | | | 568243T6 (MMLR3DT01), 731436H1 (LUNGNOT03), SAGA00508R1, SAGA00557R1 |
| 6 | 113 | 456487 | KERANOT01 | 168091H1 (LIVRNOT01), 456487H1 (KERANOT01), 532096R1 (BRAINOT03), |
| | | | | 619791H1 (PGANNOT01), 825933R1 (PROSNOT06), 1436382F1 (PANCNOT08), |
| | | | | 1439054F6 (PANCNOT08), 1700156F6 (BLADTUT05), 2274307R6 (PROSNON01), |
| | | | | 2515549H1 (LIVRTUT04), 5158675H1 (BRSTTMT02) |
| 7 | 114 | 490256 | HNT2AGT01 | 490256H1 (HNT2AGT01), 507309F1 (TMLR3DT02), 507309X15 (TMLR3DT02); |
| | | | | 2724951H1 (OVARTUT05), SZZZ00188R1, SZZZ02099R1, g825070, g1242173 |
| 8 | 115 | 494740 | HNT2NOT01 | 494740H1 (HNT2NOT01), 770196R1 (COLNCRT01), 1235126F1 (LUNGFET03), |
| | | | | 1235126T1 (LUNGFET03), 1326711F1 (LPARNOT02), 1816820F6 (PROSNOT20), |
| | | | | 1853059H1 (LUNGFET03) |
| 9 | 116 | 507475 | TMLR3DT02 | 507475H1 (TMLR3DT02), 535932R6 (ADRENOT03), 779955H1 (MYOMNOT01), |
| | | | | 1928396T6 (BRSTNOT02), 2078558H1 (ISLTNOT01) |
| 10 | 117 | 531581 | BRAINOT03 | 084009X13 (HYPONOB01), 413718R1 (BRSTNOT01), 413718X22F1 (BRSTNOT01), |
| | | | | 531581H1 (BRAINOT03), 531581T6 (BRAINOT03), 2171348H1 (ENDCNOT03), |
| | | | | 2795710T6 (NPOLNOT01), 2926562F7 (TLYMNOT04), 2926562T7 (TLYMNOT04), |
| | | | | 4341890H1 (BRAUNOT02), 4405904H1 (PROSDIT01) |
| 11 | 118 | 675190 | CRBLNOT01 | 675190H1 (CRBLNOT01), 675190X13 (CRBLNOT01), 1812672F6 (PROSTUT12), |
| | | | | 2573205R6 (HIPOAZT01) |
| 12 | 119 | 685434 | UTRSNOT02 | 685434CT1 (UTRSNOT02), 685434H1 (UTRSNOT02), 1904155F6 (OVARNOT07), |
| | | | | 2784031F6 (BRSTNOT13), 3129338F6 (LUNGTUT12) |
| 13 | 120 | 788663 | PROSNOT05 | 788663H1 (PROSNOT05), 1451931F1 (PENITUT01), 1960289H1 (BRSTNOT04), |
| | | | | 2083142F6 (UTRSNOT08), 2542122H1 (BONRTUT01), 2581153F6 (KIDNTUT13), |
| | | | | 3577780H1 (BRONNOT01) |
| 14 | 121 | 870100 | LUNGAST01 | 625091R6 (PGANNOT01), 870100H1 (LUNGAST01), 870100X12 (LUNGAST01), |
| | | | | 1231358H1 (BRAITUT01), STEQ00206R1, SZZZ00601R1, SZZZ02045R1 |
| 15 | 122 | 879500 | THYRNOT02 | 281880H1 (CARDNOT01), 859232R1 (BRAITUT03), 879500H1 (THYRNOT02), |
| | | | | 1250675F6 (LUNGFET03), 1601165F6 (BLADNOT03), 1823981F6 (GBLATUT01), |
| | | | | 2187360F6 (PROSNOT26), 2262956H1 (UTRSNOT02), 2433567H1 (BRAVUNT02), |
| | | | | 2656846F6 (LUNGTUT09), 2993077F6 (KIDNFET02), 3085846H1 (HEAONOT03), |
| | | | | 3181794T6 (TLYJNOT01), 4285141F6 (LIVRDIR01), 4774779H1 (BRAQNOT01), |
| | | | | 5507484H1 (BRADDIR01), 5512965H1 (BRADDIR01), SCMA05658V1, SCMA03540V1, |
| | | | | SCMA00007V1, g2224558 |
| 16 | 123 | 975377 | MUSCNOT02 | 026851R1 (SPLNFET01), 786313R1 (PROSNOT05), 975377H1 (MUSCNOT02), |
| | | | | 975377X19 (MUSCNOT02), 975377X21 (MUSCNOT02), 1354139X14 (LUNGNOT09), |
| | | | | 2546208H1 (UTRSNOT11) |
| 17 | 124 | 1208721 | BRSTNOT02 | 1208721H1 (BRSTNOT02), 1286769F1 (BRAINOT11), 1456447F6 (COLNFET02), |
| | | | | 1722840T6 (BLADNOT06), 1998475R6 (BRSTTUT03), 2740916F6 (BRSTTUT14), |
| | | | | 3234886H1 (COLNUCT03), 4588959H1 (MASTTXT01), 4710080H1 (BRAIFET02), |
| | | | | g1425135 |
| 18 | 125 | 1234329 | LUNGFET03 | 259818T6 (HNT2RAT01), 264365H1 (HNT2AGT01), 349606H1 (LVENNOT01), |
| | | | | 399059H1 (PITUNOT02), 1234329H1 (LUNGFET03), 1257012F1 (MENITUT03), |
| | | | | 1442838F1 (THYRNOT03), 1443014R1 (THYRNOT03), 1515850F1 (PANCTUT01), |
| | | | | 2186886F6 (PROSNOT26), 2655641F6 (THYMNOT04), 2703809F6 (OVARTUT10), |
| | | | | g1688736, g1985577 |
| 19 | 126 | 1238747 | LUNGTUT02 | 501158R6 (NEUTLPT01), 565047H1 (NEUTLPT01), 769541R6 (COLNCRT01), |
| | | | | 890561T6 (STOMTUT01), 1238747H1 (LUNGTUT02), 1510233F6 (LUNGNOT14), |
| | | | | 1510233T6 (LUNGNOT14) |
| 20 | 127 | 1265980 | BRAINOT09 | 1265980H1 (BRAINOT09), 2155287X13F1 (BRAINOT09), 2155287X23F1 |
| | | | | (BRAINOT09), 2158376T6 (BRAINOT09), SAGA02430F1 |
| 21 | 128 | 1297333 | BRSTNOT07 | 1297333H1 (BRSTNOT07), 1297333X12 (BRSTNOT07), 1297333X14 (BRSTNOT07), |
| | | | | SAGA00259F1, SAGA00400R1 |
| 22 | 129 | 1312824 | BLADTUT02 | 306400R6 (HEARNOT01), 1312824H1 (BLADTUT02), 1312824T6 (BLADTUT02), |
| | | | | 1840110H1 (EOSITXT01), 1846489R6 (COLNNOT09), 1985201R6 (LUNGAST01), |
| | | | | 2199162H1 (SPLNFET02), 2779784H1 (OVARTUT03), 3528903H1 (BLADNOT09), |
| | | | | 3767951H1 (BRSTNOT24), 4251647H1 (BRADDIR01), 5205078H2 (BRAFNOT02), |
| | | | | 5423679H1 (PROSTMT07), SANA02095F1, g1941058 |
| 23 | 130 | 1359294 | LUNGNOT12 | 139446H1 (LIVRNOT01), 258759H1 (HNT2RAT01), 268845H1 (HNT2NOT01), |
| | | | | 492813R1 (HNT2NOT01), 1213691H1 (BRSTTUT01), 1222480H1 (COLNTUT02), |
| | | | | 1243093H1 (LUNGNOT03), 1319296H1 (BLADNOT04), 1359294H1 (LUNGNOT12), |
| | | | | 1404752F6 (LATRTUT02), 1404752T6 (LATRTUT02), 1479678H1 (CORPNOT02), |
| | | | | 1558471H1 (SPLNNOT04), 1857126H1 (PROSNOT18), 1870761H1 (SKINBIT01) |
| 24 | 131 | 1377380 | LUNGNOT10 | 962085R1 (BRSTTUT03), 1377380H1 (LUNGNOT10), 1670530F6 (BMARNOT03), |
| | | | | 1853551T6 (LUNGFET03), 2119555R6 (BRSTTUT02), SCIA03178V1 |
| 25 | 132 | 1383473 | BRAITUT08 | 780421H1 (MYOMNOT01), 1344946F6 (PROSNOT11), 1383473F6 (BRAITUT08), |
| | | | | 1383473H1 (BRAITUT08), 1906164T6 (OVARNOT07), 2302122R6 (BRSTNOT05), |
| | | | | 2328233R6 (COLNNOT11), 2615335F6 (GBLANOT01), 5836742H1 (BRAIDIT05) |
| 26 | 133 | 1388860 | EOSINOT01 | 415763R1 (BRSTNOT01), 1388860H1 (EOSINOT01), SAFC02379F1, SAFC01030F1, |
| | | | | SAFC00771F1, SAFC02719F1 |
| 27 | 134 | 1395322 | THYRNOT03 | 1332909F6 (PANCNOT07), 1332909X16 (PANCNOT07), 1332909X23R1 (PANCNOT07), |
| | | | | 1332909X24R1 (PANCNOT07), 1395322H1 (THYRNOT03), 1477406F1 (CORPNOT02), |
| | | | | 3422017H1 (UCMCNOT04) |
| 28 | 135 | 1419370 | KIDNNOT09 | 243596H1 (HIPONOT01), 929439R1 (CERVNOT01), 1310519F1 (COLNFET02), |
| | | | | 1395856T1 (THYRNOT03), 1419370F1 (KIDNNOT09), 1419370H1 (KIDNNOT09), |
| | | | | 1666159F6 (BRSTNOT09), 3461531H1 (293TF2T01), 4710948H1 (BRAIFET02), |
| | | | | SBGA01870F1, g947108, g1991693 |
| 29 | 136 | 1429773 | SINTBST01 | 1306171T6 (PLACNOT02), 1313558F1 (BLADTUT02), 1429773H1 (SINTBST01), |
| | | | | 1469411F1 (PANCTUT02), 1626615F6 (COLNPOT01), 1807088F6 (SINTNOT13), |
| | | | | 2641613F6 (LUNGTUT08), 2692245F6 (LUNGNOT23), 2695323H1 (UTRSNOT12), |
| | | | | 2851378H1 (BRSTTUT13), 3387328F6 (LUNGTUT17) |
| 30 | 137 | 1470820 | PANCTUT02 | 1232690F6 (LUNGFET03), 1470820H1 (PANCTUT02), 1484705F1 (CORPNOT02), |
| | | | | 2831707F6 (TLYMNOT03), 3073715H1 (BONEUNT01) |
| 31 | 138 | 1483455 | CORPNOT02 | 487811X26 (HNT2AGT01), 1483455H1 (CORPNOT02), 1849167F6 (LUNGFET03), |
| | | | | 1856220F6 (PROSNOT18), 2822949F6 (ADRETUT06), 2822949T6 (ADRETUT06), |
| | | | | 2851743F6 (BRSTTUT13), g2159610 |
| 32 | 139 | 1527064 | UCMCL5T01 | 001612H1 (U937NOT01), 001923H1 (U937NOT01), 1235664H1 (LUNGFET03), |
| | | | | 1412779H1 (BRAINOT12), 1527064H1 (UCMCL5T01), 1598233T6 (BLADNOT03), |
| | | | | 1702565H1 (BLADTUT05), 1973691H1 (UCMCL5T01), 2227436H1 (SEMVNOT01), |
| | | | | 2472092F6 (THP1NOT03), 2634126H1 (COLNTUT15) |
| 33 | 140 | 1557491 | BLADTUT04 | 046771H1 (CORNNOT01), 1456684F6 (COLNFET02), 1456684T6 (COLNFET02), |
| | | | | 1554967F1 (BLADTUT04), 1557491H1 (BLADTUT04), 1992143H1 (CORPNOT02), |
| | | | | 2687476F6 (LUNGNOT23), 3139175F6 (SMCCNOT02), 4746319H1 (SMCRUNT01) |
| 34 | 141 | 1576862 | LNODNOT03 | 496787F1 (HNT2NOT01), 496787R1 (HNT2NOT01), 1572855F6 (LNODNOT03), |
| | | | | 1576862H1 (LNODNOT03), 1576862X11 (LNODNOT03), 1576862X19 (LNODNOT03), |
| | | | | 1576862X21 (LNODNOT03), 3284579T6 (HEAONOT05), SBIA03851D1, SBIA04892D1, |
| | | | | SBIA07089D1 |
| 35 | 142 | 1609731 | COLNTUT06 | 112132F1 (PITUNOT01), 112132R1 (PITUNOT01), 159643X1 (ADENINB01), |
| | | | | 1609731H1 (COLNTUT06), 1609731T6 (COLNTUT06), 5445363H1 (LNODNOT12), |
| | | | | g2204797 |
| 36 | 143 | 1674538 | BLADNOT05 | 1432420H1 (BEPINON01), 1579336F6 (DUODNOT01), 1674538F6 (BLADNOT05), |
| | | | | 1674538H1 (BLADNOT05), 2656555H1 (LUNGTUT09), 4249348H1 (BRADDIR01), |
| | | | | 4618275H1 (BRAYDIT01), 4760417H1 (BRAMNOT01), g3785154, g1623216, |
| | | | | g899854, g1717534 |
| 37 | 144 | 1675287 | BLADNOT05 | 868686T1 (LUNGAST01), 984876R1 (LVENNOT03), 1456253F1 (COLNFET02), |
| | | | | 1675287H1 (BLADNOT05), 1675845H1 (BLADNOT05), 2047281F6 (THP1T7T01), |
| | | | | 2808537H1 (BLADTUT08), 4883514F6 (LUNLTMT01) |
| 38 | 145 | 1693903 | COLNNOT23 | 1358877F1 (LUNGNOT09), 1573956F1 (LNODNOT03), 1693903F6 (COLNNOT23), |
| | | | | 1693903H1 (COLNNOT23), 2184065F6 (SININOT01), 3316112F6 (PROSBPT03), |
| | | | | SXAF02294V1 |
| 39 | 146 | 1702962 | DUODNOT02 | 794279R6 (OVARNOT03), 814285R6 (OVARTUT01), 1702962H1 (DUODNOT02), |
| | | | | 2186132H1 (PROSNOT26), 2880019F6 (UTRSTUT05), 5196364H1 (LUNLTUT04) |
| 40 | 147 | 1712916 | PROSNOT16 | 1712916F6 (PROSNOT16), 1712916H1 (PROSNOT16), 2186575F6 (PROSNOT26), |
| | | | | g3399946 |
| 41 | 148 | 1748313 | STOMTUT02 | 940469R6 (ADRENOT03), 1317481F6 (BLADTUT02), 1748313H1 (STOMTUT02), |
| | | | | 1870549F6 (SKINBIT01), 2169544F6 (ENDCNOT03), 2285816H1 (BRAINON01), |
| | | | | 2383066F6 (ISLTNOT01), 2613757F6 (ESOGTUT02), SZAS01459V1, SZAS00220V1 |
| 42 | 149 | 1754833 | LIVRTUT01 | 710767H1 (SYNORAT04), 1396892F6 (BRAITUT08), 1754833H1 (LIVRTUT01), |
| | | | | 1754833T6 (LIVRTUT01), 1879592F6 (LEUKNOT03), 2331424R6 (COLNNOT11), |
| | | | | 3125146H1 (LNODNOT05), 3212201H1 (BLADNOT08), 3585117H1 (293TF4T01) |
| 43 | 150 | 1798701 | COLNNOT27 | 122777F1 (LUNGNOT01), 122777R1 (LUNGNOT01), 1215026R6 (BRSTTUT01), |
| | | | | 1753224H1 (LIVRTUT01), 1798701H1 (COLNNOT27), 2041087H1 (HIPONON02), |
| | | | | SAEA00596F1, SAEA00135F1 |
| 44 | 151 | 1842496 | COLNNOT07 | 027249F1 (SPLNFET01), 1330406H1 (PANCNOT07), 1842496H1 (COLNNOT07), |
| | | | | 1981256R6 (LUNGTUT03), 3215321F7 (TESTNOT07) |
| 45 | 152 | 1868613 | SKINBIT01 | 1868613H1 (SKINBIT01), 1999115R6 (BRSTTUT03), 2159835F7 (ENDCNOT02), |
| | | | | 2453392H1 (ENDANOT01), 2753832H1 (THP1AZS08), 2781021T6 (OVARTUT03), |
| | | | | 3597161F6 (FIBPNOT01), 4567678H1 (HELATXT01), 4998328H1 (MYEPTXT02) |
| 46 | 153 | 1870609 | SKINBIT01 | 474617H1 (MMLR1DT01), 1391829F6 (THYRNOT03), 1722968F6 (BLADNOT06), |
| | | | | 1722968T6 (BLADNOT06), 1833131H1 (BRAINON01), 1870609F6 (SKINBIT01), |
| | | | | 1870609H1 (SKINBIT01), 1870609T6 (SKINBIT01), 2542675H2 (UTRSNOT11), |
| | | | | 2580351F6 (KIDNTUT13), 2653740H1 (THYMNOT04), 3228774H1 (COTRNOT01) |
| 47 | 154 | 1871961 | LEUKNOT02 | 743684F1 (BRAITUT01), 835705R1 (PROSNOT07), 1624519F6 (BRAITUT13), |
| | | | | 1688618F6 (PROSTUT10), 1871961F6 (LEUKNOT02), 1871961H1 (LEUKNOT02), |
| | | | | 1965802R6 (BRSTNOT04), 2453823F6 (ENDANOT01), 4689940H1 (PROSTMT05) |
| 48 | 155 | 1876258 | LEUKNOT02 | 808836R1 (LUNGNOT04), 1390870H1 (EOSINOT01), 1876258H1 (LEUKNOT02), |
| | | | | SZAH00430F1, SZAH03995F1, SZAH00534F1, SZAH01526F1 |
| 49 | 156 | 1929822 | COLNTUT03 | 040201F1 (TBLYNOT01), 424589R6 (BLADNOT01), 638245H1 (BRSTNOT03), |
| | | | | 1251025F1 (LUNGFET03), 1391470H1 (EOSINOT01), 1699535F6 (BLADTUT05), |
| | | | | 1929822H1 (COLNTUT03), 2218644H1 (LUNGNOT18), 2291751R6 (BRAINON01), |
| | | | | 3242060H1 (COLAUCT01), 3317796F6 (PROSBPT03), 3401711H1 (ESOGNOT03), |
| | | | | 3488355H1 (EPIGNOT01), 4030773H1 (BRAINOT23), 4180362H1 (SINITUT03), |
| | | | | 4891448H1 (PROSTMT05), 5539034H1 (KIDNFEC01), g3882288 |
| 50 | 157 | 1970095 | UCMCL5T01 | 114097F1 (TESTNOT01), 168757H1 (LIVRNOT01), 754038R1 (BRAITUT02), |
| | | | | 772953R1 (COLNCRT01), 880261R1 (THYRNOT02), 1970095F6 (UCMCL5T01), |
| | | | | 1970095H1 (UCMCL5T01), 2235148F6 (PANCTUT02), SAEA02374R1 |
| 51 | 158 | 1975473 | PANCTUT02 | 1340447F1 (COLNTUT03), 1500133F6 (SINTBST01), 1663908F6 (BRSTNOT09), |
| | | | | 1975473H1 (PANCTUT02), 3726008H1 (BRSTNOT23) |
| 52 | 159 | 1976527 | PANCTUT02 | 160328R6 (ADENINB01), 982222T2 (TONGTUT01), 993118R6 (COLNNOT11), |
| | | | | 1709642T6 (PROSNOT16), 1976527F6 (PANCTUT02), 1976527H1 (PANCTUT02), |
| | | | | 3586151F6 (293TF4T01), SXAE03918V1, SXAE05371V1 |
| 53 | 160 | 2108023 | BRAITUT03 | 1493429H1 (PROSNON01), 2012466H1 (TESTNOT03), 2108023H1 (BRAITUT03), |
| | | | | 2108023T6 (BRAITUT03) |
| 54 | 161 | 2135746 | ENDCNOT01 | 998857R6 (KIDNTUT01), 1384325F1 (BRAITUT08), 1727569F6 (PROSNOT14), |
| | | | | 2135746F6 (ENDCNOT01), 2135746H1 (ENDCNOT01), 2255539R6 (OVARTUT01), |
| | | | | 2999008H1 (OVARTUT07), 3623266H1 (ENDANOT03), 5412531H1 (BRATNOT03) |
| 55 | 162 | 2154810 | BRAINOT09 | 035033X11 (HUVENOB01), 035033X14 (HUVENOB01), 1857664F6 (PROSNOT18), |
| | | | | 1857664T6 (PROSNOT18), 2154810H1 (BRAINOT09), 2847166T6 (DRGLNOT01), |
| | | | | 5094009F6 (EPIMNON05) |
| 56 | 163 | 2228991 | PROSNOT16 | 2228991F6 (PROSNOT16), 2228991H1 (PROSNOT16), 3970066F6 (PROSTUT10) |
| 57 | 164 | 2241206 | PANCTUT02 | 1235632F6 (LUNGFET03), 1514392F1 (PANCTUT01), 1533915F1 (SPLNNOT04), |
| | | | | 2241206H1 (PANCTUT02), 2724267X303D1 (LUNGTUT10), 5218584T6 (BRSTNOT35), |
| | | | | 5567773H1 (TLYMNOT08) |
| 58 | 165 | 2259590 | OVARTUT01 | 935085T1 (CERVNOT01), 1915979H1 (PROSTUT04), 2259590H1 (OVARTUT01), |
| | | | | 2259590R6 (OVARTUT01), 2259590T6 (OVARTUT01) |
| 59 | 166 | 2307537 | NGANNOT01 | 628086T6 (KIDNNOT05), 931221T6 (CERVNOT01), 2307537H1 (NGANNOT01), |
| | | | | 2307537R6 (NGANNOT01), 2799812H1 (PENCNOT01), 3318983H1 (PROSBPT03), |
| | | | | 4158531F6 (ADRENOT14), SBZA00461V1, SBZA04079V1 |
| 60 | 167 | 2440675 | EOSITXT01 | 806660R6 (BSTMNOT01), 1390870H1 (EOSINOT01), 2440675H1 (EOSITXT01), |
| | | | | SZAH00430F1, SZAH03995F1, SZAH00534F1, SZAH01526F1 |
| 61 | 168 | 2463542 | THYRNOT08 | 2463542F6 (THYRNOT08), 2463542H1 (THYRNOT08), 2552885F6 (THYMNOT03), |
| | | | | 2655535F7 (THYMNOT04), 2869957T6 (THYRNOT10), 3042074F7 (BRSTNOT16), |
| | | | | 3769037H1 (BRSTNOT24), 3801333H1 (SPLNNOT12), 3927329H1 (KIDNNOT19) |
| 62 | 169 | 2486031 | CONUTUT01 | 1417222F6 (BRAINOT12), 2486031F6 (CONUTUT01), 2486031H1 (CONUTUT01), |
| | | | | 2634120X315D2 (COLNTUT15), 2951631T6 (KIDNFET01), g3806506 |
| 63 | 170 | 2493052 | ADRETUT05 | 1376888T6 (LUNGNOT10), 1488851F6 (UCMCL5T01), 2108437R6 (BRAITUT03), |
| | | | | 2493052F7 (ADRETUT05), 2493052H1 (ADRETUT05), 2493052T6 (ADRETUT05), |
| | | | | 2840241F6 (DRGLNOT01), 4364312H1 (SKIRNOT01) |
| 64 | 171 | 2512074 | CONUTUT01 | 008250X12 (HMC1NOT01), 030534X12 (THP1NOB01), 1686214F6 (PROSNOT15), |
| | | | | 2395458F6 (THP1AZT01), 2512074H1 (CONUTUT01), 2963912F6 (SCORNOT04), |
| | | | | 5326933F6 (DRGTNON04) |
| 65 | 172 | 2646274 | LUNGTUT11 | 724811R6 (SYNOOAT01), 2646274H1 (LUNGTUT11), 3436027F6 (PENCNOT05) |
| 66 | 173 | 2672566 | KIDNNOT19 | 1381053F1 (BRAITUT08), 2108293R6 (BRAITUT03), 2672566H1 (KIDNNOT19), |
| | | | | 2908546F6 (THYMNOT05), 3730092H1 (SMCCNON03) |
| 67 | 174 | 2689674 | LUNGNOT23 | 2256960T6 (OVARTUT01), 2507571F6 (CONUTUT01), 2689674F6 (LUNGNOT23), |
| | | | | 2689674H1 (LUNGNOT23), 2755742H1 (THP1AZS08), 5096438H1 (EPIMNON05) |
| 68 | 175 | 2703282 | OVARTUT10 | 056400H1 (FIBRNOT01), 1484887F6 (CORPNOT02), 1484887T6 (CORPNOT02), |
| | | | | 1641813F6 (HEARFET01), 1810188H1 (PROSTUT12), 2351291F6 (COLSUCT01), |
| | | | | 2703282H1 (OVARTUT10), 3790456H1 (BRSTNOT28), 4084543T6 (CONFNOT02), |
| | | | | 4994160H1 (LIVRTUT11), 5393763H1 (KIDNNOT32) |
| 69 | 176 | 2738293 | OVARNOT09 | 412176R1 (BRSTNOT01), 418633T6 (BRSTNOT01), 1232594F1 (LUNGFET03), |
| | | | | 1301651T6 (BRSTNOT07), 2738293F6 (OVARNOT09), 2738293H1 (OVARNOT09), |
| | | | | 5290883H1 (LIVRTUS02) |
| 70 | 177 | 2772776 | PANCNOT15 | 784334R1 (PROSNOT05), 2772776H1 (PANCNOT15), 3750404H1 (UTRSNOT18) |
| 71 | 178 | 2774476 | PANCNOT15 | 2774476H1 (PANCNOT15), 3664676T6 (PANCNOT16), 3835889F6 (PANCNOT17), |
| | | | | 4167883X305V1 (PANCNOT21), SCCA02152V1 |
| 72 | 179 | 2804624 | BLADTUT08 | 162435R1 (ADENINB01), 1304830T1 (PLACNOT02), 2080378X19F1 (UTRSNOT08), |
| | | | | 2660596H1 (LUNGTUT09), 2804624H1 (BLADTUT08) |
| 73 | 180 | 2848225 | BRSTTUT13 | 346073X101 (THYMNOT02), 346073X26C1 (THYMNOT02), 391609T6 (TMLR2DT01), |
| | | | | 2848225H1 (BRSTTUT13), 4624612T6 (ENDVNOT01) |
| 74 | 181 | 2882241 | UTRSTUT05 | 1637060F6 (UTRSNOT06), 1711682F6 (PROSNOT16), 1902475H1 (OVARNOT07), |
| | | | | 2017387F6 (THP1NOT01), 2882241F6 (UTRSTUT05), 2882241H1 (UTRSTUT05), |
| | | | | 3532864H1 (KIDNNOT25) |
| 75 | 182 | 2939011 | THYMFET02 | 897237R1 (BRSTNOT05), 897237T1 (BRSTNOT05), 1618381F6 (BRAITUT12), |
| | | | | 2679105F6 (SINIUCT01), 2939011F6 (THYMFET02), 2939011H1 (THYMFET02), |
| | | | | 2939011T6 (THYMFET02) |
| 76 | 183 | 2947188 | BRAITUT23 | 377292X1 (NEUTFMT01), 425953R6 (BLADNOT01), 425953T6 (BLADNOT01), |
| | | | | 425953X28 (BLADNOT01), 429350T6 (BLADNOT01), 451192F1 (TLYMNOT02), |
| | | | | 451192R1 (TLYMNOT02), 1786579H1 (BRAINOT10), 2947188H1 (BRAITUT23) |
| 77 | 184 | 3094001 | BRSTNOT19 | 1494663T6 (PROSNON01), 2083139X11F1 (UTRSNOT08), 3094001H1 (BRSTNOT19) |
| 78 | 185 | 3110061 | BRSTTUT15 | 986428R6 (LVENNOT03), 1449222R1 (PLACNOT02), 3085841F6 (HEAONOT03), |
| | | | | 3110061F7 (BRSTTUT15), 3110061H1 (BRSTTUT15), 4308349T6 (BRAUNOT01), |
| | | | | 4637040F6 (MYEPTXT01) |
| 79 | 186 | 3146614 | PENCNOT06 | 638370R1 (BRSTNOT03), 1398786T1 (BRAITUT08), 1435622F1 (PANCNOT08), |
| | | | | 1720684F6 (BLADNOT06), 2194122F6 (THYRTUT03), 2459594H1 (THYRNOT08), |
| | | | | 3146614H1 (PENCNOT06), 3278069H1 (STOMFET02), 3357696F6 (PROSTUT16) |
| 80 | 187 | 3295381 | TLYJINT01 | 2222227F6 (LUNGNOT18), 3295381H1 (TLYJINT01), SZZZ00995R1, SZZZ00226R1, |
| | | | | SZZZ00209R1, SZZZ00347R1, SZZZ00451R1 |
| 81 | 188 | 3364774 | PROSBPT02 | 1339847F6 (COLNTUT03), 1415866F6 (BRAINOT12), 2458556T6 (ENDANOT01), |
| | | | | 2515467F6 (LIVRTUT04), 2523246H1 (BRAITUT21), 3095773H1 (CERVNOT03), |
| | | | | 3315208F6 (293TF2T01), 3364774H1 (PROSBPT02), 3697590H1 (SININOT05), |
| | | | | 4618612H1 (BRAYDIT01), g1422476 |
| 82 | 189 | 3397777 | UTRSNOT16 | 2906192F6 (THYMNOT05), 3046506F7 (HEAANOT01), 3046506X329D1 (HEAANOT01), |
| | | | | 3046506X331D1 (HEAANOT01), 3397777F7 (UTRSNOT16), 3397777H1 (UTRSNOT16), |
| | | | | 3846636H1 (DENDNOT01), 4569754H2 (PROSTUT21) |
| 83 | 190 | 3403046 | ESOGNOT03 | 2754425R6 (THP1AZS08), 3403046H1 (ESOGNOT03), 3844619F6 (DENDNOT01) |
| 84 | 191 | 3538506 | SEMVNOT04 | 483831H1 (HNT2RAT01), 1451166F1 (PENITUT01), 3187785H1 (THYMON04), |
| | | | | 3538506F6 (SEMVNOT04), 3538506H1 (SEMVNOT04), 3868721F6 (BMARNOT03), |
| | | | | 5108547F6 (PROSTUS19), 5163595H1 (ENDIUNT01), 5324664H1 (FIBPFEN06), |
| | | | | g2056736 |
| 85 | 192 | 3575519 | BRONNOT01 | 970343R6 (MUSCNOT02), 975169R6 (MUSCNOT02), 3575519H1 (BRONNOT01), |
| | | | | SCSA04735V1, SCSA03846V1 |
| 86 | 193 | 3598694 | FIBPNOT01 | 1330295F1 (PANCNOT07), 3332508T6 (BRAIFET01), 3520552H1 (LUNGNON03), |
| | | | | 3598694H1 (FIBPNOT01), 5203510H1 (STOMNOT08), 5506937H1 (BRADDIR01), |
| | | | | SCCA00526V1, SCCA04468V1, SCCA03065V1, SCCA02377V1, SCCA00888V1, |
| | | | | SCCA02832V1 |
| 87 | 194 | 3638819 | LUNGNOT30 | 837827X22 (PROSNOT07), 837827X23 (PROSNOT07), 3638819H1 (LUNGNOT30) |
| 88 | 195 | 3717139 | PENCNOT10 | 3717139H1 (PENCNOT10), g2106014, g2980871 |
| 89 | 196 | 3892962 | BRSTTUT16 | 594617R6 (BRAVUNT02), 837890X18 (PROSNOT07), 1961640R6 (BRSTNOT04), |
| | | | | 2330093H1 (COLNNOT11), 2726737F6 (OVARTUT05), 3892962H1 (BRSTTUT16) |
| 90 | 197 | 4153521 | MUSLTMT01 | 118141F1 (MUSCNOT01), 487811X24 (HNT2AGT01), 487811X26 (HNT2AGT01), |
| | | | | 868070R6 (BRAITUT03), 1832527T6 (BRAINON01), 2851743T6 (BRSTTUT13), |
| | | | | 4153521H1 (MUSLTMT01), 4531734H1 (PROSTMT03), SZZZ01004R1 |
| 91 | 198 | 4585038 | OVARNOT13 | 546958R6 (BEPINOT01), 656154H1 (EOSINOT03), 3415219H1 (PTHYNOT04), |
| | | | | 3683524H1 (HEAANOT01), 3750253H1 (UTRSNOT18), 4089875H1 (LIVRNOT06), |
| | | | | 4585038H1 (OVARNOT13), g756767, g756768 |
| 92 | 199 | 4674640 | NOSEDIT02 | 191268R1 (SYNORAB01), 1414304F6 (BRAINOT12), 3272067F6 (BRAINOT20), |
| | | | | 4674640H1 (NOSEDIT02), SCDA05786V1, SCDA07745V1, SZAP01877V1 |
| 93 | 200 | 4676066 | NOSEDIT02 | 875407R1 (LUNGAST01), 1478971F6 (CORPNOT02), 1749564F6 (STOMTUT02), |
| | | | | 2263128H1 (UTRSNOT02), 4676066H1 (NOSEDIT02), 5449856H1 (BSCNDIT02), |
| | | | | 5487675H1 (DRGTNON04), g3118452 |
| 94 | 201 | 4830687 | BRAVTXT03 | 534025F1 (BRAINOT03), 4830687H1 (BRAVTXT03) |
| 95 | 202 | 4880891 | UTRMTMT01 | 055751H1 (FIBRNOT01), 1288342F6 (BRAINOT11), 1288342T6 (BRAINOT11), |
| | | | | 1396095F6 (THYRNOT03), 1820602F6 (GBLATUT01), 2123331F6 (BRSTNOT07), |
| | | | | 2462011F6 (THYRNOT08), 2645166X303D1 (OVARTUT03), 2666343H1 (ADRETUT06), |
| | | | | 2666343T6 (ADRETUT06), 2715208F6 (THYRNOT09), 2881019F6 (UTRSTUT05), |
| | | | | 3448078X331D1 (UTRSNON03), 4880891H1 (UTRMTMT01), 5465061H1 (LNODNOT11), |
| | | | | 5503746H1 (BRABDIR01), SBLA03155F1, SBLA02267F1 |
| 96 | 203 | 4909754 | THYMDIT01 | 014580H1 (THP1PLB01), 1348640F6 (PROSNOT11), 1685157F6 (PROSNOT15), |
| | | | | 3427741H1 (BRSTNOR01), 3540578H1 (SEMVNOT04), 4909754F6 (THYMDIT01), |
| | | | | 4909754H1 (THYMDIT01), 5834707H1 (BRAIDIT05), g1940399 |
| 97 | 204 | 4911931 | THYMDIT01 | 428504F1 (BLANDNOT01), 468041R6 (LATRNOT01), 2342984F6 (TESTTUT02), |
| | | | | 2887138H1 (SINJNOT02), 4911931H1 (THYMDIT01) |
| 98 | 205 | 4920433 | TESTNOT11 | 2006765R6 (TESTNOT03), 4920433F6 (TESTNOT11), 4920433H1 (TESTNOT11) |
| 99 | 206 | 5042113 | COLHTUT01 | 537782R6 (LNODNOT02), 537782T6 (LNODNOT02), 724003H1 (SYNOOAT01), |
| | | | | 2700935X302B2 (OVARTUT10), 2700935X302F1 (OVARTUT10), 3572973T6 |
| | | | | (BRONNOT01), 5042113H1 (COLHTUT01), SBIA02608D1, SBIA08390D1 |
| 100 | 207 | 5083853 | LNOGTUT01 | 1537455H1 (SINTTUT01), 5083853F6 (LNOGTUT01), 5083853H1 (LNOGTUT01), |
| | | | | 5083853T6 (LNOGTUT01) |
| 101 | 208 | 5283981 | TESTNON04 | 542319F1 (OVARNOT02), 542319X15F1 (OVARNOT02), 542319X17F1 (OVARNOT02), |
| | | | | 1710519F6 (PROSNOT16), 5283981H1 (TESTNON04) |
| 102 | 209 | 5510549 | BRADDIR01 | 1257226F6 (MENITUT03), 1654887F6 (PROSTUT08), 1866033F6 (PROSNOT19), |
| | | | | 2309180H1 (NGANNOT01), 2516285F6 (LIVRTUT04), 3558606H1 (LUNGNOT31), |
| | | | | 4689374H1 (LIVRTUT11), 5510549H1 (BRADDIR01) |
| 103 | 210 | 5544862 | TESTNOC01 | 1210853R1 (BRSTNOT02), 1803417F6 (SINTNOT13), 5544862F6 (TESTNOC01), |
| | | | | 5544862H1 (TESTNOC01), 5544862T6 (TESTNOC01), 5547247F6 (TESTNOC01), |
| | | | | g989649, g3246546, g2112974, g697810 |
| 104 | 211 | 5573394 | TLYMNOT08 | 027981H1 (SPLNFET01), 310525T6 (TMLR2DT01), 826528R1 (PROSNOT06), |
| | | | | 868061R6 (BRAITUT03), 1985188T6 (LUNGAST01), 2207165F6 (SINTFET03), |
| | | | | 5507004H1 (BRADDIR01), 5573394H1 (TLYMNOT08), SBIA11388D1, SBIA11986D1, |
| | | | | SBIA03475D1 |
| 105 | 212 | 5850840 | FIBAUNT02 | 232422F1 (SINTNOT02), 232442R1 (SINTNOT02), 826837R1 (PROSNOT06), |
| | | | | 1286853F1 (BRAINOT11), 2058494R6 (OVARNOT03), 2842471F6 (DRGLNOT01), |
| | | | | 3105825F6 (BRSTTUT15), 3617707H1 (EPIPNOT01), 3620903H1 (BRSTNOT25), |
| | | | | 4148432H1 (SINITUT04), 5850840H1 (FIBAUNT02) |
| 106 | 213 | 5942936 | COLADIT05 | 121785R6 (MUSCNOT01), 797379T6 (OVARNOT03), 797379X14R1 (OVARNOT03), |
| | | | | 797379X25R1 (OVARNOT03), 3690756H1 (HEAANOT01), 5942936H1 (COLADIT05) |
| 107 | 214 | 5951431 | LIVRTUN04 | 623984R6 (PGANNOT01), 676513T6 (CRBLNOT01), 1730442F6 (BRSTTUT08), |
| | | | | 2640175F6 (LUNGTUT08), 3360767F6 (PROSTUT16), 5951431H1 (LIVRTUN04), |
| | | | | SAEA03186R1 |

[0354] TABLE 2

| Polypep- | | | Potential | Potential | | | |
|---|---|---|---|---|---|---|---|
| tide | | Amino | Phospho- | Glycosyla- | | | Analytical |
| SEQ ID | | Acid | rylation | tion | Signature Sequences, | | Methods and |
| NO: | | Residues | Sites | Sites | Motifs and Domains | Homologous Sequences | Databases |
| 1 | 095210 | 463 | S72 T7 S16 S49 | N38 N53 | ATP/GTP-binding site | g498721 | MOTIFS |
| | | | T371 T58 S68 | | motif A (P-loop): | zinc finger protein | BLAST_GENBANK |
| | | | S72 | | G412-S419 | [Homo sapiens] | BLAST_PFAM |
| | | | | | Zinc finger C2H2 type | Abrink, M. et al. | BLIMPS_BLOCKS |
| | | | | | domain: C133-H153 | (1995) DNA Cell Biol. | BLIMPS_PRODOM |
| | | | | | C161-H181 C189-H209 | 14: 125-136 | BLAST_DOMO |
| | | | | | C217-H237 C245-H265 | | |
| | | | | | C273-H293 C301-H321 | | |
| | | | | | C329-H349 C357-H377 | | |
| | | | | | C385-H405 C413-H423 | | |
| | | | | | C441-H461 | | |
| | | | | | KRAB box domain: V6- | | |
| | | | | | R66 | | |
| 2 | 157953 | 216 | T28 T140 T2 | N152 | bZIP transcription | g4996451 leucine- | MOTIFS |
| | | | T139 S210 | | factors basic domain | zipper protein | BLAST_GENBANK |
| | | | | | signature: K147-R163 | | BLAST_PFAM |
| | | | | | | | BLIMPS_BLOCKS |
| | | | | | | | BLAST_DOMO |
| 3 | 159196 | 284 | S153 S44 T189 | N94 N95 | Zinc finger C2H2 type | g55471 Zinc finger | MOTIFS |
| | | | T232 S3 T62 | N207 | domain: C86-H106 C114- | protein expressed in | BLAST_GENBANK |
| | | | S125 S148 T245 | | H134 C142-H162 C170- | post-meiotic | BLAST_PFAM |
| | | | Y140 Y196 | | H190 C198-H218 C226- | spermatogenesis | |
| | | | | | H246 C254-H274 | Denny, P. and | |
| | | | | | | Ashworth, A. (1991) | |
| | | | | | | Gene 106: 221-227 | |
| 4 | 343338 | 1416 | S817 T406 S142 | N40 N261 | ATP/GTP-binding site | g7717364 | MOTIFS |
| | | | S236 S272 S329 | N409 | motif A (P-loop): | homolog to cAMP | BLAST_GENBANK |
| | | | S395 S412 S413 | N467 | A1086-T1093 A1131- | response element | BLAST_PFAM |
| | | | T426 S427 S439 | N1040 | T1138 | binding and beta | PROFILESCAN |
| | | | S474 S475 S476 | N1130 | Beta-transducin family | transducin family | BLIMPS_PRINTS |
| | | | T531 S669 S711 | N1167 | Trp-Asp repeats | proteins [Homo | BLAST_PRODOM |
| | | | T735 T832 S876 | | signature: v34-S48 | sapiens] | BLAST_DOMO |
| | | | S878 T954 T960 | | L77-L91 | | |
| | | | S972 S1051 | | Bromodomain signature: | | |
| | | | T1138 S1378 T42 | | A778-H853, P935-T991 | | |
| | | | S141 T262 T307 | | | | |
| | | | S315 T336 T345 | | | | |
| | | | S381 T400 T469 | | | | |
| | | | S482 S506 T625 | | | | |
| | | | T634 T707 T803 | | | | |
| | | | S843 S869 S891 | | | | |
| | | | T892 S993 S1002 | | | | |
| | | | T1033 S1103 T31 | | | | |
| | | | S1143 S1169 | | | | |
| | | | T1317 S1329 | | | | |
| | | | S1336 S1397 | | | | |
| | | | Y658 T1406 Y346 | | | | |
| | | | Y813 Y945 Y970 | | | | |
| 5 | 402386 | 426 | S292 T14 S65 | N12 | Zinc finger C2H2 type | g487785 zinc finger | MOTIFS |
| | | | S115 S24 T36 | | domain: F6-G44, C102- | protein ZNF136 | BLAST_GENBANK |
| | | | T139 T164 T192 | | H124, Y169-H191, C171- | Tommerup, N. and | BLAST_PFAM |
| | | | S196 S380 Y229 | | H191, Y225-H247, Y253- | Vissing, H. (1995) | BLIMPS_PRODOM |
| | | | | | H276, H282-H304, Y310- | Genomics 27: 259-264 | BLAST_PRODOM |
| | | | | | H332, Y338-H360, Y366- | | BLAST_DOMO |
| | | | | | H388 | | |
| | | | | | KRAB box domain: V4- | | |
| | | | | | V67 | | |
| 6 | 456487 | 686 | S407 T408 S27 | N79 N128 | Putative GTPase | g3880859 similar to | MOTIFS |
| | | | S94 S117 T176 | N213 | activating protein for | Ank repeat (2 domains) | BLAST_GENBANK |
| | | | S185 T224 S225 | N616 | Arf: A464-E584 | | BLAST_PFAM |
| | | | S260 S318 T426 | | HIV REV interacting | | BLIMPS_PRINTS |
| | | | T427 S460 S542 | | protein: N476-R512, | | BLAST_PRODOM |
| | | | S558 T559 S569 | | V516-N537 | | BLAST_DOMO |
| | | | T595 S611 T618 | | Zinc finger motif: | | |
| | | | S668 T6 T135 | | Q468-P581 | | |
| | | | S247 S256 S278 | | | | |
| | | | S293 T299 T337 | | | | |
| | | | S357 S386 S451 | | | | |
| | | | S555 | | | | |
| 7 | 490256 | 348 | T3 T108 T114 | | Zinc finger C2H2 type | g2316003 | MOTIFS |
| | | | T163 T181 S29 | | domain: C238-H258 | zinc finger protein | BLAST_GENBANK |
| | | | S134 S302 | | C266-H286 C294-H314 | [Homo sapiens] | BLAST_PFAM |
| | | | | | C322-H342 | Lee, P. L. et al. | BLIMPS_BLOCKS |
| | | | | | Zinc finger motif: E8- | (1997) Genomics | BLIMPS_PRINTS |
| | | | | | Q173 | 43: 191-201 | BLIMPS_PRODOM |
| | | | | | | | BLAST_DOMO |
| 8 | 494740 | 181 | T22 T37 S60 T78 | | Zinc finger motif: | g487836 transcription | MOTIFS |
| | | | T87 S12 T70 | | F79-G117 | factor | BLAST_GENBANK |
| | | | T124 S157 | | KRAB box: V77-R126 | | BLAST_PFAM |
| | | | | | | | BLIMPS_PRODOM |
| | | | | | | | BLAST_PRODOM |
| | | | | | | | BLAST_DOMO |
| 9 | 507475 | 126 | S2 S15 S71 S104 | | TFIIS zinc ribbon | g7212805 | MOTIFS |
| | | | y97 | | domain signature: G65- | transcription- | BLAST_GENBANK |
| | | | | | K123 | associated zinc ribbon | PROFILESCAN |
| | | | | | | protein [Homo sapiens] | BLIMPS_BLOCKS |
| | | | | | | Fan, W. et al. (2000) | BLAST_DOMO |
| | | | | | | Genomics 63: 139-141 | |
| 10 | 531581 | 610 | S177 S410 T438 | N194 | Zinc finger C2H2 type | g8843908 | MOTIFS |
| | | | T466 S44 S55 | N206 | domain: C304-H324 | zinc finger protein | BLAST_GENBANK |
| | | | S125 T146 S233 | | C332-H352 C360-H381 | SBBIZ1 [Homo sapiens] | HMMER_PFAM |
| | | | S239 S282 S289 | | C389-H409 C417-H437 | | BLIMPS_BLOCKS |
| | | | S482 S507 S523 | | C445-H465 C473-H493 | | BLIMPS_PRINTS |
| | | | S531 S532 T537 | | C501-H522 | | BLIMPS_PRODOM |
| | | | S539 T179 S188 | | Zinc finger activator | | BLAST_PRODOM |
| | | | T255 S279 S316 | | domain: M9-E124 | | BLAST_DOMO |
| | | | S462 Y81 Y415 | | | | |
| | | | Y443 Y471 | | | | |
| 11 | 675190 | 111 | T102 S17 S24 | N3 | Zinc finger protein | g10442700 | MOTIFS |
| | | | T33 T67 S9 S43 | | domain: F25-G63 | zinc-finger protein | BLAST_GENBANK |
| | | | S97 | | KRAB box domain: S22- | ZBRK1 [Homo sapiens] | BLIMPS_PRODOM |
| | | | | | P94 | Zheng L. et al. (2000) | BLAST_DOMO |
| | | | | | | Mol Cell 6: 757-768 | BLAST_PFAM |
| 12 | 685434 | 152 | T6 T17 S109 | N15 | | g4336830 RFX-Bdelta4 | MOTIFS |
| | | | | | | immunodeficiency- | BLAST_GENBANK |
| | | | | | | associated | |
| | | | | | | transcription factor | |
| | | | | | | Nagarajan, U. M. et al. | |
| | | | | | | (1999) Immunity | |
| | | | | | | 10: 153-162 | |
| 13 | 788663 | 131 | S30 S65 T73 | N122 | Transcription factor | G2583171 CCAAT-binding | MOTIFS |
| | | | S124 T45 S60 | | domain: R15-K96 | transcription factor | BLAST_GENBANK |
| | | | S65 | | | subunit AAB-1 | BLAST_DOMO |
| | | | | | | Chen, H. et al. (1998) | |
| | | | | | | Genetics 148: 123-130 | |
| 14 | 870100 | 541 | S7 S24 S69 S85 | N192 | Zinc finger C2H2 type | g189044 zinc finger | MOTIFS |
| | | | S99 S253 T255 | N450 | domain: C152-H172, | protein 42 (MZF-1, | BLAST_GENBANK |
| | | | T302 S505 S151 | N454 | C180-H200, C208-H228, | preferentially | HMMER_PFAM |
| | | | T245 T315 S356 | | C362-H382, C390-H410, | expressed in myeloma | BLIMPS_BLOCKS |
| | | | S521 | | C418-H438, C446-H466, | cells) | BLIMPS_PRINTS |
| | | | | | C474-H494 | Hromas, R. et al. | BLIMPS_PRODOM |
| | | | | | | (1991) J Biol Chem | |
| | | | | | | 266: 14183-14187 | |
| 15 | 879500 | 1828 | S1194 S1283 | N174 | Helicases conserved c- | g5106572 | MOTIFS |
| | | | S1307 S1390 | N725 | terminal domain: D672- | transcriptional | BLAST_GENBANK |
| | | | S1395 S1467 | N794 | G755 | activator SRCAP | HMMER_PFAM |
| | | | S1530 S1554 | N1197 | | Johnston, H. et al. | BLAST_PRODOM |
| | | | S1614 S1629 | | | (1999) J Biol Chem | BLAST_DOMO |
| | | | S1651 S1652 | | | 274: 16370-16376 | |
| | | | S1653 S1717 | | | | |
| | | | S1766 S1770 | | | | |
| | | | S1775 S1820 | | | | |
| | | | S323 S443 S487 | | | | |
| | | | S497 S691 S716 | | | | |
| | | | S767 S822 S894 | | | | |
| | | | S921 S926 S980 | | | | |
| | | | S994 T1271 | | | | |
| | | | T1322 T1333 | | | | |
| | | | T1354 T1482 | | | | |
| | | | T1712 T1731 | | | | |
| | | | T1784 T322 T451 | | | | |
| | | | T549 T692 T727 | | | | |
| | | | T770 T803 T908 | | | | |
| | | | T976 | | | | |
| 16 | 975377 | 482 | S185 S200 S258 | N306 | Zinc finger C3HC4 type | g1304599 ZNF127-Xp | MOTIFS |
| | | | S295 S319 S330 | | signature: K57-L112, | (associated with | BLAST_GENBANK |
| | | | S366 S408 S463 | | I208-C236, C305-I314 | Prader-Willi | BLAST_PFAM |
| | | | T118 T123 T196 | | | behavioral syndrome) | BLIMPS_BLOCKS |
| | | | T205 T209 T461 | | | Jong, M. T. et al. | |
| | | | T60 Y230 Y77 | | | (1999) Hum Mol Genet | |
| | | | | | | 8: 783-793 | |
| 17 | 1208721 | 264 | S11 S59 T100 | | | | MOTIFS |
| | | | T114 T235 S259 | | | | |
| | | | S23 S138 | | | | |
| 18 | 1234329 | 350 | S170 S229 T290 | | Zinc finger C3HC4 type | g3880441 | MOTIFS |
| | | | S303 S129 S235 | | signature: C298-C338 | similar to zinc finger | BLAST_GENBANK |
| | | | T331 | | PHD-finger: R313-Q327 | C3HC4 type | HMMER_PFAM |
| | | | | | | | PROFILESCAN |
| | | | | | | | BLIMPS_PFAM |
| 19 | 1238747 | 549 | S102 S175 S248 | N77 N328 | SAND DNA-binding | g9964115 | MOTIFS |
| | | | S273 S296 S303 | | domain: S454-L535 | transcriptional | BLAST_GENBANK |
| | | | S329 S346 S364 | | | coactivator Sp110 | HMMER_PFAM |
| | | | S437 S438 S485 | | | [Homo sapiens] | |
| | | | T201 T271 T287 | | | Bloch, D. B. et al. | |
| | | | T370 T375 T396 | | | (2000) Mol Cell Biol | |
| | | | T44 T467 T498 | | | 20: 6138-6146 | |
| | | | T524 T70 | | | | |
| 20 | 1265980 | 337 | S22 T84 T85 T56 | | Helix-loop-helix DNA | g4566748 basic helix- | MOTIFS |
| | | | S131 S238 S242 | | binding domain: R95- | loop-helix | BLAST_GENBANK |
| | | | T247 T326 S47 | | S147, M1-L73 | transcription factor | HMMER_PFAM |
| | | | T56 T127 T135 | | Myc-type ‘helix-loop- | Ndr1 | PROFILESCAN |
| | | | S230 S272 Y281 | | helix’ dimerization | Liao, J. et al. (1999) | BLIMPS_BLOCKS |
| | | | | | domain signature: | DNA Cell | BLAST_PRODOM |
| | | | | | E103-R118, T127-S147, | Biol 18: 333-344 | BLAST_DOMO |
| | | | | | N111-N164, E66-Q171 | | |
| | | | | | Transcription | | |
| | | | | | regulation domain: | | |
| | | | | | R191-N337 | | |
| 21 | 1297333 | 581 | S16 S29 T41 S47 | N78 N90 | Zinc finger C2H2 type | g387079 zinc finger | MOTIFS |
| | | | T35 S92 S110 | N201 | domain: C135-H155 | protein (mkr5) | BLAST_GENBANK |
| | | | T184 S254 T368 | N426 | C163-H183 C191-H212, | Chowdhury, K. et al. | HMMER_PFAM |
| | | | S480 S493 S531 | | C220-H240, C248-H268, | (1988) Nucleic Acids | BLIMPS_BLOCKS |
| | | | Y56 Y89 | | C276-H296 C304-H324 | Res 16: 9995-10011 | BLIMPS_PRINTS |
| | | | | | C332-H352 C360-H380, | | BLIMPS_PRODOM |
| | | | | | C388-H408, C416-H436, | | BLAST_PRODOM |
| | | | | | C444-H464, C472-H492, | | BLAST_DOMO |
| | | | | | C500-H520 | | |
| 22 | 1312824 | 591 | S126 S127 S167 | N296 | Ets-related | g972940 Elf-1 | MOTIFS |
| | | | S278 S293 S389 | N384 | transcription factor | Transcription | BLAST_GENBANK |
| | | | S404 S435 S460 | N489 | domain: D273-F591, | regulation protein | HMMER_PFAM |
| | | | S510 S546 S64 | | I180-F261 I180-K193, | Davis, J. N. and | PROFILESCAN |
| | | | S88 T203 T298 | | E206-K224, H225-Y243, | Roussel, M. F. (1996) | BLIMPS_BLOCKS |
| | | | T377 T554 Y233 | | Y244-K262 | Gene 171: 265-269 | BLIMPS_PRINTS |
| | | | | | | | BLAST_PRODOM |
| | | | | | | | BLAST_DOMO |
| 23 | 1359294 | 767 | S141 S391 S43 | N18 | ‘Cold-shock’ DNA- | g57455 unr protein | MOTIFS |
| | | | S461 S463 S485 | N288 | binding domain | Ferrer, N. et al. | BLAST_GENBANK |
| | | | S567 S620 S664 | N549 | signature: Y37-V88, | (1999) DNA Cell Biol | HMMER_PFAM |
| | | | S75 T111 T201 | N728 | L121-M146, F166-R215 | 18: 209-218 | BLIMPS_BLOCKS |
| | | | T278 T291 T301 | | F329-V365, F499-N549, | | BLAST_PRODOM |
| | | | T494 T580 T646 | | F654-W705 | | BLAST_DOMO |
| | | | T696 T730 T79 | | Unr protein DNA | | |
| | | | | | binding repeat domain: | | |
| | | | | | E98-D767 | | |
| 24 | 1377380 | 206 | S11 S131 S15 | | | g7012714 | MOTIFS |
| | | | S152 S163 S167 | | | L2DTL WD-40 repeat | BLAST_GENBANK |
| | | | S181 S193 S2 | | | protein [Homo sapiens] | |
| | | | S34 S38 S84 S85 | | | | |
| | | | S93 T51 | | | | |
| 25 | 1383473 | 352 | S74 T95 T154 | N104 | Signal peptide motif: | g4587558 Similar to X- | MOTIFS |
| | | | S165 S222 S322 | N205 | M1-A23 | linked apoptosis | BLAST_GENBANK |
| | | | S207 S236 S297 | | Transmembrane motif: | inhibitor | HMMER |
| | | | S308 | | L243-L259, C302-C339 | | |
| | | | | | Baculovirus inhibitor | | |
| | | | | | of apoptosis protein | | |
| | | | | | repeat (BIR): L298- | | |
| | | | | | C336 | | |
| 26 | 1388860 | 532 | S153 S27 S409 | N42 N65 | Zinc finger C2H2 type | g4519270 Kruppel-type | MOTIFS |
| | | | S465 S520 T103 | | domain: C201-H221 | zinc finger protein | BLAST_GENBANK |
| | | | T17 T360 T39 | | C229-H249 C257-H277 | Katoh, O. (1998) | HMMER_PFAM |
| | | | T49 Y138 Y367 | | C285-H305 C313-H333 | Biochem. Biophys. Res. | BLIMPS_BLOCKS |
| | | | | | C341-H361 C369-H389 | Commun. 249: 595-600 | BLIMPS_PRINTS |
| | | | | | C397-H417 C425-H445, | | BLIMPS_PRODOM |
| | | | | | C453-H473, C481-H500, | | BLAST_PRODOM |
| | | | | | C508-H528 | | BLAST_DOMO |
| | | | | | Zinc finger domain: | | |
| | | | | | F9-G47, K48-K146 | | |
| | | | | | KRAB box domain: D5- | | |
| | | | | | E78 | | |
| 27 | 1395322 | 444 | S105 S134 S155 | N54 | Zinc finger C2H2 type | g6063139 | MOTIFS |
| | | | S319 S375 T110 | N153 | domain: C283-H303, | POZ/zinc finger | BLAST_GENBANK |
| | | | T291 T347 T378 | N166 | C311-H331, C339-H359 | transcription factor | HMMER_PFAM |
| | | | T69 T7 T88 Y40 | N287 | C367-H387 C420-H440 | ODA-8 [Mus musculus] | BLIMPS_BLOCKS |
| | | | | | | | BLIMPS_PRINTS |
| | | | | | | | BLIMPS_PRODOM |
| 28 | 1419370 | 347 | S183 T307 T14 | | Zinc finger C3HC4 type | g11611473 | MOTIFS |
| | | | T263 T300 | | signature: C164-C202 | Deltex3 | BLAST_GENBANK |
| | | | | | | Kishi, N. et al. | HMMER_PFAM |
| | | | | | | (2001) Int. J. Dev. | BLIMPS_BLOCKS |
| | | | | | | Neurosci. 19: 21-35 | PROFILESCAN |
| 29 | 1429773 | 308 | S29 S31 T250 | N112 | Transmembrane domain: | g7542723 | MOTIFS |
| | | | S257 Y130 | | P213-M237 | DHHC1 protein [Homo | BLAST_GENBANK |
| | | | | | | sapiens] | HMMER |
| 30 | 1470820 | 80 | S14 S32 T21 S36 | | GC-rich sequence DNA | | MOTIFS |
| | | | S72 Y63 | | binding factor domain: | | |
| | | | | | R11-V75 (P-value = 5.9 × 10⁻⁶ | | |
| 31 | 1483455 | 570 | S116 S132 S181 | N212 | ATP/GTP-binding site | g7688669 | MOTIFS |
| | | | S211 S470 S564 | N502 | motif A (P-loop) A216- | zinc finger protein | BLAST_GENBANK |
| | | | S70 S79 S87 T14 | N530 | S223 | ZNF140-like protein | HMMER_PFAM |
| | | | T143 T168 T237 | | Zinc finger C2H2 type | [Homo sapiens] | BLIMPS_BLOCKS |
| | | | T5 T54 T569 T88 | | domain C238-H258, | | BLIMPS_PRINTS |
| | | | | | C266-H286, C294-H314, | | BLIMPS_PRODOM |
| | | | | | C322-H342, C350-H370, | | BLAST_PRODOM |
| | | | | | C378-H398, C406-H426, | | BLAST_DOMO |
| | | | | | C434-H454, C462-H482, | | |
| | | | | | C490-H510, C518-H538 | | |
| | | | | | Zinc finger protein | | |
| | | | | | motif: V4-W77 | | |
| | | | | | KRAB box domain: V4- | | |
| | | | | | M73 | | |
| 32 | 1527064 | 390 | S107 S145 S167 | N160 | Transcription factor | g 532313 NF45 protein | MOTIFS |
| | | | S344 S354 S52 | N214 | domain: V102-E371 | Kao, P. N. et al. | BLAST_GENBANK |
| | | | T112 T162 T172 | | Heat shock factor | (1994) J Biol Chem | BLIMPS_PRINTS |
| | | | T219 T352 | | (transcriptional | Aug 12, 1994; | BLAST_DOMO |
| | | | | | activator) signature: | 269: 20691-9 | |
| | | | | | L317-I329 | | |
| 33 | 1557491 | 601 | S158 S163 S179 | N2 N104 | Zinc finger C2H2 type | g 220643 zinc finger | MOTIFS |
| | | | S219 S313 S334 | N484 | domain C418-H438, | protein | BLAST_GENBANK |
| | | | S355 S513 S559 | | C446-H466, C474-H494, | | HMMER_PFAM |
| | | | S82 T186 T187 | | C502-H522, C533-H553 | | BLIMPS_BLOCKS |
| | | | T190 T218 T246 | | | | BLIMPS_PRINTS |
| | | | T318 T412 T430 | | | | BLIMPS_PRODOM |
| | | | T482 T486 T514 | | | | |
| | | | T594 Y75 | | | | |
| 34 | 1576862 | 834 | S127 S135 S36 | | PHD finger: C219-I233 | g1510153 similar to | MOTIFS |
| | | | S50 S520 S531 | | Zinc finger protein | human bromodomain | BLAST_GENBANK |
| | | | S628 S679 S696 | | motif: C202-R260, | protein BR140 | BLIMPS_PFAM |
| | | | S70 S745 S798 | | L256-H364 | Nagase, T. et al. DNA | BLAST_PRODOM |
| | | | S803 S805 S9 | | Peregrin | Res 1996 Oct | BLAST_DOMO |
| | | | T391 T445 T487 | | transcriptional | 31; 3(5): 321-9, 341-54 | |
| | | | T543 T663 T688 | | regulator domain: | | |
| | | | T724 T761 T791 | | D199-K389, A524-A551 | | |
| 35 | 1609731 | 499 | S104 S108 S16 | N139 | Zinc finger C2H2 type | g456269 zinc finger | MOTIFS |
| | | | S50 S56 S81 | | domain: C169-H189, | protein 30 | BLAST_GENBANK |
| | | | T155 T259 T7 | | C197-H217, C225-H245, | Denny, P. and | HMMER_PFAM |
| | | | Y134 | | C253-H273, C281-H301, | Ashworth, A. (1994) | BLIMPS_BLOCKS |
| | | | | | C309-H329, C337-H358, | Mamm. Genome | BLIMPS_PRINTS |
| | | | | | C365-H385, C393-H413, | 5: 643-645 | BLIMPS_PRODOM |
| | | | | | C421-H441, C449-H469, | | BLAST_PRODOM |
| | | | | | C477-H497 | | BLAST_DOMO |
| | | | | | KRAB box domain: Q3-V71 | | |
| 36 | 1674538 | 402 | S102 S158 S193 | N303 | Zinc finger C2H2 type | g 55473 zinc finger | MOTIFS |
| | | | S219 S324 S384 | N382 | domain: C73-H93, C101- | protein | BLAST_GENBANK |
| | | | T12 T292 T3 | | H121, C129-H149, C157- | | HMMER_PFAM |
| | | | T344 T354 Y351 | | H177, C185-H205, C213- | | BLIMPS_BLOCKS |
| | | | | | H233, C241-H261, C269- | | BLAST_PRODOM |
| | | | | | H289 | | BLAST_DOMO |
| | | | | | Zinc finger protein | | |
| | | | | | domain: | | |
| | | | | | E62-H121, Q82-K153, | | |
| | | | | | K162-K237, K246-K319 | | |
| 37 | 1675287 | 579 | S134 S22 S270 | | Zinc finger C3HC4 type | g1136384 C3HC4 | MOTIFS |
| | | | S347 S57 T176 | | signature: C400-C408 | containing protein | BLAST_GENBANK |
| | | | T222 T293 T526 | | Zinc finger protein | | BLIMPS_BLOCKS |
| | | | T535 T537 T82 | | domain: C206-C408 | | BLAST_PRODOM |
| | | | Y285 Y362 | | | | |
| 38 | 1693903 | 426 | S12 S231 S290 | N246 | CCCH-Zinc finger | | MOTIFS |
| | | | S328 S360 S381 | | protein motif: | | BLIMPS-PFAM |
| | | | S63 T114 T318 | | C113-H123 | | |
| | | | T408 | | | | |
| 39 | 1702962 | 266 | S78 T127 T163 | N20 | Zinc finger C2H2 type | g5001720 | MOTIFS |
| | | | T171 T196 T261 | | domain: F175-H197, | odd-skipped related 1 | BLAST_GENBANK |
| | | | Y203 | | H193-C205, E194-H221, | protein [Mus musculus] | BLAST_PFAM |
| | | | | | C205-H225, H225-H249, | So, P. L. and | BLIMPS_BLOCKS |
| | | | | | P230-S243, F231-H253 | Danielian P. S. (1999) | BLIMPS_PRINTS |
| | | | | | | Mech. Dev. 84: 157-160 | BLIMPS_PRODOM |
| | | | | | | | BLAST_DOMO |
| 40 | 1712916 | 358 | S160 S164 S21 | N228 | ‘Homeobox’ domain | g 1899230 iroquois- | MOTIFS |
| | | | S230 S255 S267 | N238 | signature: | class homeodomain | BLAST_GENBANK |
| | | | S269 S286 S291 | N249 | K74-K129, N95-L106, | protein IRX-2a | BLIMPS_BLOCKS |
| | | | S299 S350 T101 | N284 | L106-K129, S110-K129 | | BLIMPS_PRINTS |
| | | | T131 T99 Y97 | | | | BLAST_DOMO |
| 41 | 1748313 | 260 | S102 S183 S204 | N53 | | | MOTIFS |
| | | | S228 S35 S74 | N124 | | | |
| | | | T13 T145 T167 | N178 | | | |
| | | | T176 T30 | | | | |
| 42 | 1754833 | 263 | S109 S177 S45 | N258 | Zinc finger C3HC4 type | g3790583 RING-H2 | MOTIFS |
| | | | S83 S95 T31 T55 | | signature: C181-C221, | finger protein RHC1a | BLAST_GENBANK |
| | | | T59 T67 T74 | | S177-T232 | | HMMER_PFAM |
| | | | | | | | PROFILESCAN |
| 43 | 1798701 | 581 | S356 S368 S43 | N77 | | g6688742 | MOTIFS |
| | | | S473 S8 T145 | N164 | | putative TH1 protein | BLAST_GENBANK |
| | | | T166 T202 T309 | N550 | | [Mus musculus] | |
| | | | T360 T377 T425 | | | | |
| | | | T486 T556 T559 | | | | |
| | | | T56 T95 Y175 | | | | |
| 44 | 1842496 | 117 | S4 | | | g 4336506 | MOTIFS |
| | | | | | | transcription | BLAST_GENBANK |
| | | | | | | elongation factor | |
| 45 | 1868613 | 202 | | | | g171091 | MOTIFS |
| | | | | | | ASF1 [Saccharomyces | BLAST_GENBANK |
| | | | | | | cerevisiae] DNA | BLAST_PRODOM |
| | | | | | | repair-associated | |
| | | | | | | protein | |
| | | | | | | Le, S. et al. (1997) | |
| | | | | | | Yeast 13: 1029-1042 | |
| 46 | 1870609 | 442 | S166 S18 S308 | N398 | Zinc finger C3HC4 type | g5931953 | MOTIFS |
| | | | S315 S322 S341 | | signature: C140-C177 | autocrine motility | BLAST_GENBANK |
| | | | S358 S373 S400 | | | factor receptor [Mus | BLAST_PFAM |
| | | | S401 T129 T176 | | | musculus] | |
| | | | T26 T303 T333 | | | Shimizu, K. et al. | |
| | | | T422 | | | (1999) FEBS Lett. | |
| | | | | | | 456: 295-300 | |
| 47 | 1871961 | 765 | S177 S198 S264 | N81 | Zinc finger C2H2 type | g6672074 | MOTIFS |
| | | | S514 S547 S604 | N175 | domain: C595-H617, | nuclear protein NP94 | BLAST_GENBANK |
| | | | S682 T225 T269 | N520 | C687-H709 | [Homo sapiens] | |
| | | | T349 T504 T645 | | GAL 11 transcription | | |
| | | | T696 | | factor motif: T347- | | |
| | | | | | M627 | | |
| | | | | | Coiled coil domain: | | |
| | | | | | Q4-Q44, E206-Q428 | | |
| 48 | 1876258 | 352 | S118 S153 S222 | | ATP/GTP-binding site | g 4165083 growth | MOTIFS |
| | | | S255 S317 S9 | | motif A (P-loop): | factor independence-1B | BLAST_GENBANK |
| | | | T250 T289 T321 | | A193-T200 | (transcription factor | HMMER_PFAM |
| | | | | | Zinc finger C2H2 type | expressed in t- | BLIMPS_BLOCKS |
| | | | | | domain: C165-H186, | lymphocytes) | BLIMPS_PRINTS |
| | | | | | C168-S222, C194-H214, | B. Rodel et al. | BLIMPS_PRODOM |
| | | | | | C244-H264, C247-Q301, | Genomics 1998 Dec | BLAST_PRODOM |
| | | | | | C272-H292, C275-E329, | 15; 54(3): 580-2 | BLAST_DOMO |
| | | | | | P297-S310, C300-H320, | | |
| | | | | | L313-G322, H316-C328, | | |
| | | | | | C328-H349, F323-K352 | | |
| 49 | 1929822 | 1102 | S1001 S1008 | N50 | Homeobox domain: L771- | g4406073 activity- | MOTIFS |
| | | | S1051 S1067 S11 | N132 | R813 | dependent | BLAST_GENBANK |
| | | | S346 S365 S425 | N315 | Zinc finger C2H2 type | neuroprotective | BLIMPS_BLOCKS |
| | | | S740 S805 S82 | N398 | domain: C514-H536 | protein (contains a | |
| | | | S874 S891 S921 | N439 | Glutaredoxin active | glutaredoxin active | |
| | | | S934 S953 S955 | N486 | site: C514-V524 | site) | |
| | | | S970 S982 T142 | N674 | | Bassan, M. J Neurochem | |
| | | | T171 T18 T443 | N857 | | 1999 Mar; 72(3): 1283-93 | |
| | | | T488 T51 T52 | N887 | | | |
| | | | T520 T661 T782 | N951 | | | |
| | | | T995 Y764 Y818 | N1030 | | | |
| | | | | N1049 | | | |
| | | | | N1066 | | | |
| | | | | N1079 | | | |
| 50 | 1970095 | 121 | T25 S32 T39 T63 | N26 | | g5713279 | MOTIFS |
| | | | S72 S91 | | | Yippee protein | BLAST_GENBANK |
| | | | | | | [Drosophila | |
| | | | | | | melanogaster] | |
| 51 | 1975473 | 233 | T34 S8 S25 S65 | N26 | Signal peptide: M1- | g4704419 | MOTIFS |
| | | | T174 S199 | | A62 | WS basic-helix-loop- | BLAST_GENBANK |
| | | | | | Myc-type ‘helix-loop- | helix leucine zipper | HMMER_PFAM |
| | | | | | helix’ dimerization | protein [Homo sapiens] | BLIMPS_BLOCKS |
| | | | | | domain signature: L7- | Meng, X. et al. (1998) | BLAST_DOMO |
| | | | | | T63, V11-P122, R31- | Human Genetics | |
| | | | | | Q85, E39-H54, S65-Q85 | 103: 590-599 | |
| | | | | | FOS-type leucine | | |
| | | | | | zipper: L84-L105 | | |
| 52 | 1976527 | 147 | T63 S71 T114 | N28 N65 | Signal peptide: M1- | g9623363 | MOTIFS |
| | | | S122 | | A52 | DNA polymerase epsilon | BLAST_GENBANK |
| | | | | | NFYB transcription | p17 subunit [Homo | PROFILESCAN |
| | | | | | factor subunit: | sapiens] | BLIMPS_BLOCKS |
| | | | | | R4-K100, P5-R94, K20- | Li, Y. et al. (2000) | BLIMPS_PRINTS |
| | | | | | M76 | J. Biol. Chem. | BLAST_PRODOM |
| | | | | | CCAAT-binding | 275: 23247-23252 | BLAST_DOMO |
| | | | | | transcription factor | | |
| | | | | | motif: A56-R93, E6- | | |
| | | | | | D111 | | |
| 53 | 2108023 | 96 | T32 T7 S13 T50 | N36 | | g9294739 | MOTIFS |
| | | | T56 S73 | | | bithoraxoid-like | BLAST_GENBANK |
| | | | | | | protein [Homo sapiens] | |
| 54 | 2135746 | 259 | S56 S120 S166 | | Signal peptide: M1-G20 | | MOTIFS |
| | | | S181 S233 S23 | | | | SPSCAN |
| | | | S29 S89 T208 | | | | |
| 55 | 2154810 | 474 | S88 S156 S50 | N38 N97 | Zinc finger C2H2 type | g456269 zinc finger | MOTIFS |
| | | | S56 T80 T84 | | domain: C172-H192, | protein 30 | BLAST_GENBANK |
| | | | T124 S140 S145 | | C200-H220, C228-H248, | | HMMER_PFAM |
| | | | Y94 | | C256-H276, C284-H304, | | BLIMPS_BLOCKS |
| | | | | | C312-H332, C340-H360, | | BLIMPS_PRINTS |
| | | | | | C368-H388, C396-H416 | | BLIMPS_PRODOM |
| | | | | | Zinc finger protein | | BLAST_PRODOM |
| | | | | | motif: F8-G46 | | BLAST_DOMO |
| | | | | | KRAB box domain: S5- | | |
| | | | | | Y75 | | |
| 56 | 2228991 | 231 | T167 S213 T99 | N97 | Signal peptide: M1-I29 | | MOTIFS |
| | | | S186 T223 S10 | | Prenyl group binding | | SPSCAN |
| | | | S35 S67 T99 | | site (CAAX box) | | BLIMPS_PFAM |
| | | | | | T228-D231 | | |
| | | | | | Zinc finger domain: | | |
| | | | | | C166-H176 | | |
| 57 | 2241206 | 456 | S37 S404 S406 | N430 | RNA-binding RGG-box | g 1177636 | MOTIFS |
| | | | T183 T205 T212 | | domain I392-G452 | transcriptional | BLAST_GENBANK |
| | | | T264 T295 T300 | | | activator SPO8 | BLAST_DOMO |
| | | | T352 T50 T72 | | | | |
| 58 | 2259590 | 159 | S87 T96 S11 S24 | | Zinc finger protein | g506502 NK10 Zinc | MOTIFS |
| | | | S25 T118 T146 | | motif: F88-G126 | finger repressor | BLAST_GENBANK |
| | | | | | KRAB box domain: V86- | protein [Mus musculus] | BLIMPS_PRODOM |
| | | | | | C156 | 2.9e−15 47% ID aa 75-159 | BLAST_PRODOM |
| | | | | | | Lange, R. et al. DNA | BLAST_DOMO |
| | | | | | | Cell Biol 1995 | |
| | | | | | | Nov; 14(11): 971-81 | |
| 59 | 2307537 | 260 | T66 S124 S182 | N36 N195 | | g4325209 endocrine | MOTIFS |
| | | | S197 T7 S56 S77 | | | regulator | BLAST_GENBANK |
| 60 | 2440675 | 352 | S118 S153 S222 | | A193 ATP/GTP-binding | g 4165083 growth | MOTIFS |
| | | | S255 S317 S9 | | site motif A (P-loop) | factor independence-1B | BLAST_GENBANK |
| | | | T250 T289 T321 | | A193-T201 | Zinc finger protein | BLIMPS_PRINTS |
| | | | | | Zinc finger C2H2 type | Rodel, B. et al. | BLIMPS_PRODOM |
| | | | | | domain C165-H186 | Genomics 1998 Dec | BLAST_PRODOM |
| | | | | | C194-H215, C244-H265, | 15; 54 (3): 580-2 | BLAST_DOMO |
| | | | | | C272-H293, C300-H321, | | |
| | | | | | C328-H349 | | |
| 61 | 2463542 | 467 | S126 S132 S200 | N114 | Zinc finger C2H2 type | | MOTIFS |
| | | | S214 S220 S249 | N335 | domain: C6-H28 | | BLAST_GENBANK |
| | | | S393 S404 S419 | N354 | | | HMMER_PFAM |
| | | | S42 S430 S435 | | | | BLIMPS_BLOCKS |
| | | | S449 S77 T105 | | | | BLIMPS_PRINTS |
| | | | T14 T253 T397 | | | | |
| | | | T454 T81 Y313 | | | | |
| 62 | 2486031 | 550 | S115 S272 S317 | N238 | Homeobox domain: L70- | g 1504088 DNA-binding | MOTIFS |
| | | | S429 S441 S444 | N249 | I112 | protein | BLAST_GENBANK |
| | | | S62 S81 T302 | | | | BLIMPS_BLOCKS |
| | | | T360 T364 | | | | |
| 63 | 2493052 | 450 | S272 S293 S368 | N122 | Signal peptide: M1-S32 | g9230649 | MOTIFS |
| | | | S41 S411 S413 | N167 | Cytochrome c family | zinc finger protein | BLAST_GENBANK |
| | | | T108 T232 T238 | N185 | heme-binding site: | 277 [Homo sapiens] | HMMER_PFAM |
| | | | T374 T409 T418 | N403 | C359-V364 | Liang, H. et al. | BLIMPS_BLOCKS |
| | | | T433 T50 Y262 | | Zinc finger C2H2 type | (2000) Genomics | |
| | | | Y396 Y99 | | domain: | 66: 226-228 | |
| | | | | | C226-H248, C357-H381 | | |
| 64 | 2512074 | 378 | S132 S3 T9 T18 | N120 | Zinc finger C2H2 type | g 881564 ZNF157 | MOTIFS |
| | | | S77 S328 T182 | N150 | domain: C161-H181, | | BLAST_GENBANK |
| | | | S197 T279 S365 | N180 | C189-H209, C217-H237, | | HMMER_PFAM |
| | | | | N255 | C245-H265, C273-H293, | | BLIMPS_BLOCKS |
| | | | | N310 | C301-H321, C329-H349, | | BLIMPS_PRINTS |
| | | | | | C357-H377 | | BLIMPS_PRODOM |
| | | | | | Zinc finger protein | | BLAST_PRODOM |
| | | | | | domain: F10-G48 | | BLAST_DOMO |
| | | | | | KRAB box domain: Q5- | | |
| | | | | | P79 | | |
| 65 | 2646274 | 233 | S14 T34 T127 | N53 N67 | Protein I | g10046714 | MOTIFS |
| | | | | | transcription | transcription | BLAST_GENBANK |
| | | | | | initiation factor F84- | initiation factor IA | BLAST_PRODOM |
| | | | | | Y230 | protein [Homo sapiens] | |
| 66 | 2672566 | 102 | T66 | N11 T99 | | g 3220232 polyhomeotic | MOTIFS |
| | | | | | | Z protein | |
| | | | | | | Hemenway, C. S. et al. | |
| | | | | | | (1998) Oncogene | |
| | | | | | | 16: 2541-2547 | |
| | | | | | | Haluska, P. et al. | |
| | | | | | | (1999) Nucleic Acids | |
| | | | | | | Res. 27: 2538-2544 | |
| 67 | 2689674 | 287 | T25 T232 S32 | | Eukaryotic putative | g 1899188 DNA binding | MOTIFS |
| | | | S122 | | RNA-binding region | protein ACBF | BLAST_GENBANK |
| | | | | | RNP-1 signature: K137- | AC-rich binding factor | HMMER_PFAM |
| | | | | | D146, L98-F116 | | BLIMPS_BLOCKS |
| | | | | | RNA recognition motif: | | BLAST_PRODOM |
| | | | | | L98-L170, L5-K77 | | BLAST_DOMO |
| 68 | 2703282 | 208 | S11 S23 S117 | | | g5712754 | MOTIFS |
| | | | Y124 | | | sex comb on midleg- | BLAST_GENBANK |
| | | | | | | like-1 protein [Homo | |
| | | | | | | sapiens] | |
| | | | | | | van de Vosse, E. et | |
| | | | | | | al. (1998) Genomics | |
| | | | | | | 49: 96-102 | |
| 69 | 2738293 | 177 | S71 T43 S5 T115 | | | g11907923 | MOTIFS |
| | | | | | | enhancer of polycomb | BLAST_GENBANK |
| | | | | | | [Homo sapiens] | |
| | | | | | | Shimono, Y. et al. | |
| | | | | | | (2000) | |
| | | | | | | J. Biol. Chem. | |
| | | | | | | 275: 39411-39419 | |
| 70 | 2772776 | 179 | T173 S29 S39 | | Zinc finger protein | g6942207 | MOTIFS |
| | | | T63 T106 | | motif: P104-A166 | PPARgamma cofactor 2 | BLAST_GENBANK |
| | | | | | | [Mus musculus] | BLAST_PRODOM |
| | | | | | | Castillo, G. C. et al. | BLAST_DOMO |
| | | | | | | (1999) EMBO J. | |
| | | | | | | 18: 3676-3687 | |
| 71 | 2774476 | 212 | S132 S159 S196 | | RBP-J Kappa | g 2052119 | MOTIFS |
| | | | S20 S201 S31 | | Recombination signal | transcription factor | BLAST_GENBANK |
| | | | S45 T136 T205 | | motif: P39-D206 | RBP-L | BLAST_PRODOM |
| | | | T68 | | | | |
| 72 | 2804624 | 256 | S103 S202 S238 | N6 N101 | MAF-1 nuclear matrix | g3786409 contains | MOTIFS |
| | | | S244 S33 S7 S85 | N132 | protein motif: G82- | similarity to | BLAST_GENBANK |
| | | | S89 T112 T212 | | T210 | Saccharomyces | BLAST_PRODOM |
| | | | T245 T99 | | | cerevisiae MAF-1 | |
| | | | | | | protein | |
| 73 | 2848225 | 475 | S179 S180 S239 | N12 N93 | Zinc finger C2H2 type | g 930123 zinc finger | MOTIFS |
| | | | S24 S295 S378 | | domain: F6-R44, C171- | protein | BLAST_GENBANK |
| | | | S434 T14 T142 | | Q191, C199-H219, C227- | | HMMER_PFAM |
| | | | T164 T282 T332 | | H247, C255-H275, C283- | | BLIMPS_BLOCKS |
| | | | T36 Y136 Y268 | | H303, C311-H331, C339- | | BLIMPS_PRINTS |
| | | | | | H358, C366-H386, C394- | | BLIMPS_PRODOM |
| | | | | | H415, C422-H442, C450- | | BLAST_PRODOM |
| | | | | | H470 | | BLAST_DOMO |
| | | | | | Zinc finger 136: W37- | | |
| | | | | | Q145 | | |
| | | | | | Zinc finger 137: S259- | | |
| | | | | | R335 | | |
| | | | | | KRAB box: M1-D76 | | |
| 74 | 2882241 | 206 | S164 S166 S57 | | Helix-loop-helix DNA- | g 1184157 Max- | MOTIFS |
| | | | S161 Y29 | | binding domain: G58- | interacting | BLAST_GENBANK |
| | | | | | E110, H27-D165 | transcriptional | BLAST_PFAM |
| | | | | | Myc-type helix-loop- | repressor | BLAST_DOMO |
| | | | | | helix motif: E66-K81, | | |
| | | | | | C90-E110 | | |
| 75 | 2939011 | 596 | S152 S203 S212 | N84 N510 | | g 5081374 | MOTIFS |
| | | | S244 S272 S477 | | | glucocorticoid | BLAST_GENBANK |
| | | | S481 S516 S536 | | | modulatory element | |
| | | | T121 T164 T200 | | | binding protein-1 | |
| | | | T204 T229 T339 | | | | |
| | | | T361 T363 T396 | | | | |
| | | | T537 T543 | | | | |
| 76 | 2947188 | 644 | S116 S207 S22 | N66 | ATP/GTP-binding site | g5441615 zinc finger | MOTIFS |
| | | | S403 S488 S85 | N190 | motif A (P-loop): | protein | BLAST_GENBANK |
| | | | T110 T487 T52 | N265 | G142-S149 | | HMMER_PFAM |
| | | | T612 | N376 | Zinc finger C2H2 type | | BLIMPS_BLOCKS |
| | | | | | domain: C199-H219, | | BLIMPS_PRINTS |
| | | | | | C227-H247, C255-H275, | | BLIMPS_PRODOM |
| | | | | | C283-H303, C311-H331, | | BLAST_PRODOM |
| | | | | | C339-H359, C367-H387, | | |
| | | | | | C395-H415, C423-H443, | | |
| | | | | | C451-H471, C479-H499, | | |
| | | | | | C507-H527, C535-H555, | | |
| | | | | | C563-H583, C591-H611, | | |
| | | | | | C619-H639 | | |
| 77 | 3094001 | 194 | T59 T110 S27 | N17 | SSU72 start-site | g4156162 | MOTIFS |
| | | | S32 S183 Y65 | | selection protein: M1- | similar to yeast SSU72 | BLAST_GENBANK |
| | | | | | F194 | | BLAST_PRODOM |
| 78 | 3110061 | 536 | S21 S134 T157 | N132 | Zinc finger C2H2 type | g1017722 repressor | MOTIFS |
| | | | S214 T76 S83 | N380 | domain: C202-H222, | transcriptional factor | BLAST_GENBANK |
| | | | S252 S404 S462 | N389 | C230-H250, C258-H277, | | HMMER_PFAM |
| | | | | N445 | C286-H306, C314-H334, | | BLIMPS_BLOCKS |
| | | | | | C342-H362, C370-H390, | | BLIMPS_PRINTS |
| | | | | | C398-H418, C426-H446, | | BLIMPS_PRODOM |
| | | | | | C454-H474, C482-H502 | | BLAST_PRODOM |
| | | | | | Transcription factor | | BLAST_DOMO |
| | | | | | GATA zinc finger | | |
| | | | | | signature: T223-S240 | | |
| | | | | | Zinc finger signature: | | |
| | | | | | F13-G51, H330-C342 | | |
| 79 | 3146614 | 412 | S184 T158 T247 | | Signal peptide: M1-R29 | g2370560 putative | MOTIFS |
| | | | S402 | | Transcription | translational | BLAST_GENBANK |
| | | | | | regulation protein | repressor | SPSCAN |
| | | | | | domain: F3-L220 | | BLAST_PRODOM |
| | | | | | Leucine zipper motif: | | |
| | | | | | L80-L101 | | |
| 80 | 3295381 | 482 | S161 S216 S318 | | Zinc finger C2H2 type | g6118383 | MOTIFS |
| | | | S352 S385 S408 | | domain: | zinc finger protein | BLAST_GENBANK |
| | | | S456 S72 S99 | | C178-H198, C206-H226, | ZNF223 [Homo sapiens] | BLAST_PFAM |
| | | | T177 T18 T84 | | C234-H254, | | BLIMPS_BLOCKS |
| | | | T88 T9 T94 | | C262-H282, C290-H310, | | BLIMPS_PRINTS |
| | | | | | C346-H366, | | BLIMPS_PRODOM |
| | | | | | C374-H394, C402-H422 | | BLAST_PRODOM |
| | | | | | Zinc finger signature: | | BLAST_DOMO |
| | | | | | F10-G48 | | |
| | | | | | KRAB box: V8-G69 | | |
| 81 | 3364774 | 554 | S134 S183 S269 | N467 | ATP/GTP-binding site | g 3818515 zinc finger | MOTIFS |
| | | | S292 S307 S458 | | motif A (P-loop): | protein ZNF210 | BLAST_GENBANK |
| | | | S514 S62 S94 | | A505-S512 | | BLAST_PFAM |
| | | | T125 T16 T325 | | Zinc finger C2H2 type | | BLIMPS_BLOCKS |
| | | | T402 T497 | | domain: C310-H330, | | BLIMPS_PRINTS |
| | | | | | C338-H358, C366-H386, | | BLIMPS_PRODOM |
| | | | | | C394-H414, C422-H442, | | BLAST_PRODOM |
| | | | | | C450-H470, C478-H498, | | BLAST_DOMO |
| | | | | | C506-H526 | | |
| | | | | | KRAB box: V124-S183 | | |
| | | | | | Zinc finger signature: | | |
| | | | | | F126-P164 | | |
| 82 | 3397777 | 488 | S171 S235 S244 | N448 | Zinc finger C3HC4 | g11022688 | MOTIFS |
| | | | S271 S346 S356 | | type signature: | interferon-responsive | BLAST_GENBANK |
| | | | S417 S42 T153 | | C30-I40, C15-C59, V9- | finger protein 1 | HMMER_PFAM |
| | | | T178 T185 | | S64 | middle form [Homo | BLIMPS_BLOCKS |
| | | | | | Interleukin 2 | sapiens] | PROFILESCAN |
| | | | | | transcription down- | Orimo, A. et al. | BLIMPS_PFAM |
| | | | | | regulatory domain: | (2000) Genomics | BLAST_PRODOM |
| | | | | | T130-W333 | 69: 143-149 | BLAST_DOMO |
| | | | | | RFP Transforming | | |
| | | | | | protein: H67-G347 | | |
| 83 | 3403046 | 127 | T57 S31 S52 | | Signal peptide: M1-P19 | g 1890635 Jun | MOTIFS |
| | | | | | bZIP transcription | dimerization protein 1 | BLAST_GENBANK |
| | | | | | factors basic domain | JDP-1 | HMMER_PFAM |
| | | | | | signature: R40-K55, | | BLIMPS_BLOCKS |
| | | | | | E33-E97 | | BLAST_PRODOM |
| | | | | | FOS transforming | | BLAST_DOMO |
| | | | | | protein: Q28-K44, N45- | | |
| | | | | | D61, L63-L84 | | |
| | | | | | DNA-binding | | |
| | | | | | transcription factor: | | |
| | | | | | A17-L104 | | |
| | | | | | Leucine zipper motifs: | | |
| | | | | | L63-L84, L70-L91 | | |
| 84 | 3538506 | 532 | S143 S170 S185 | N280 | Signal peptide: M1- | g4056411 Human homolog | MOTIFS |
| | | | S191 S282 S283 | | A51 | of Mus musculus wizS | BLAST_GENBANK |
| | | | S327 S340 S457 | | C2H2 Zn finger domain: | protein | SPSCAN |
| | | | S49 S497 S72 | | C3-H23, C109-H129, | | HMMER-PFAM |
| | | | S99 T147 T156 | | C293-H313, C463-H483, | | BLIMPS-BLOCKS |
| | | | T223 T30 T331 | | C3-H19 | | MOTIFS |
| | | | T449 T501 T71 | | | | |
| | | | T86 | | | | |
| 85 | 3575519 | 353 | S110 S194 S210 | | C3HC4 Zn finger | g9945010 | MOTIFS |
| | | | S240 S256 S266 | | domain: C23-C78, C39- | RING-finger protein | BLAST_GENBANK |
| | | | S285 T189 T198 | | A48, K19-G88 | MURF [Mus musculus] | HMMER-PFAM |
| | | | T278 T326 T60 | | RFP (Zn finger | Spencer, J. A. et al. | PROFILESCAN |
| | | | T77 | | oncogenic protein): | (2000) J. Cell Biol. | BLAST-DOMO |
| | | | | | K106-K291 | 150: 771-784 | MOTIFS |
| 86 | 3598694 | 407 | S16 S76 S151 | | | g 5668703 XDRP1 | MOTIFS |
| | | | S315 T390 | | | | BLAST_GENBANK |
| | | | | | | | BLIMPS-BLOCKS |
| 87 | 3638819 | 350 | S199 S212 S236 | N12 N210 | Transmembrane domain: | g1020145 DNA binding | MOTIFS |
| | | | Y156 Y184 | | L310-F330 | protein | BLAST_GENBANK |
| | | | | | C2H2 Zn finger domain: | | HMMER |
| | | | | | G82-A264, Y114-H136, | | HMMER-PFAM |
| | | | | | C88-H108, Y142-H164, | | BLIMPS-PRINTS |
| | | | | | F170-H192, Y198-H220, | | BLAST-PRODOM |
| | | | | | F226-H248, P113-S126, | | BLAST-DOMO |
| | | | | | L129-G138 | | MOTIFS |
| 88 | 3717139 | 215 | S108 S198 S70 | N42 N196 | Homeobox domain: K33- | g 2632119 Splice | MOTIFS |
| | | | T193 | | N96, Q36-E95, E50- | variant of homeobox | BLAST_GENBANK |
| | | | | | A112, R79-N96, T58- | gene Prx3A | HMMER-PFAM |
| | | | | | L69, L73-R92 | alternative N-terminal | PROFILESCAN |
| | | | | | | region | BLIMPS-BLOCKS |
| | | | | | | | BLIMPS-PRINTS |
| | | | | | | | BLAST- PRODOM |
| | | | | | | | BLAST-DOMO |
| 89 | 3892962 | 489 | S227 S43 S113 | N110 | C2H2 Zn finger domain: | g 488555 zinc finger | MOTIFS |
| | | | T230 T97 S196 | N200 | C132-H152, L145-G154, | protein ZNF135 | BLAST_GENBANK |
| | | | T392 | N308 | C160-H180, C188-H208, | | HMMER-PFAM |
| | | | | N319 | C216-H236, C244-H264, | | BLIMPS-BLOCKS |
| | | | | N366 | C272-H292, C300-H320, | | BLIMPS-PRINTS |
| | | | | N450 | P325-S338, C328-H348, | | BLAST-PRODOM |
| | | | | N480 | C356-H376, C384-H404, | | BLAST-DOMO |
| | | | | | C412-H432, C440-H460, | | |
| | | | | | C468-H488, G108-H488 | | |
| | | | | | Zn finger protein | | |
| | | | | | domain: K127-H488 | | |
| 90 | 4153521 | 399 | S112 S14 S146 | N139 | C2H2 Zn finger domain: | g7688669 | MOTIFS |
| | | | S157 S164 S176 | N155 | C315-H335, C231-H251, | zinc finger protein | BLAST_GENBANK |
| | | | S364 S70 S75 | N177 | C343-H363, C287-H307, | ZNF140-like protein | HMMER-PFAM |
| | | | S83 T119 T123 | N184 | C203-H223, C259-H279, | [Homo sapiens] | BLIMPS-BLOCKS |
| | | | T133 T202 T5 | | P340-S353, L216-G225, | | BLIMPS-PRINTS |
| | | | T84 | | C371-H391 | | BLIMPS_PRODOM |
| | | | | | Zn finger protein | | BLAST-PRODOM |
| | | | | | domain: V4-W77, F6- | | BLAST-DOMO |
| | | | | | G44 | | |
| | | | | | KRAB box domain: S2- | | |
| | | | | | W73, V4-D72 | | |
| 91 | 4585038 | 309 | S106 S270 S293 | | transcriptional | g 4960159 GC-rich | MOTIFS |
| | | | S51 S52 S75 S94 | | repressor DNA binding | sequence DNA-binding | BLAST_GENBANK |
| | | | T132 T172 T198 | | signature: D45-K275 | factor candidate | BLAST-PRODOM |
| | | | T205 T237 T301 | | | | |
| | | | T31 T40 T57 | | | | |
| 92 | 4674640 | 361 | S28 S30 S352 | N288 | Type I antifreeze | g 3779240 zinc finger | MOTIFS |
| | | | S56 T170 T176 | | protein signature: | protein | BLAST_GENBANK |
| | | | T206 T77 Y233 | | Q253-F270 | | BLIMPS-PRINTS |
| | | | Y68 | | | | |
| 93 | 4676066 | 540 | S115 S135 S151 | N222 | Signal peptide: M1- | g 3916727 estrogen- | MOTIFS |
| | | | S202 S301 S34 | | S29 | responsive B box | BLAST_GENBANK |
| | | | S39 S405 S490 | | RFP (Zn finger | protein | SPSCAN |
| | | | S497 T368 T508 | | oncogenic protein): | | BLIMPS_PRINTS |
| | | | | | R381-I526 | | BLAST-DOMO |
| | | | | | Adrenomedullin | | |
| | | | | | signature: R111-A128 | | |
| 94 | 4830687 | 84 | | | Signal peptide: M1- | g7649253 | MOTIFS |
| | | | | | A66 | hepatocellular | BLAST_GENBANK |
| | | | | | C3HC4 Zn finger | carcinoma associated | HMMER_PFAM |
| | | | | | domain: C33-E79, C51- | ring finger protein | SPSCAN |
| | | | | | C76, N19-K81 | [Homo sapiens] | PROFILESCAN |
| | | | | | Glycoprotein hormone | | BLAST-DOMO |
| | | | | | signature: M1-H58 | | |
| 95 | 4880891 | 1312 | S105 S1060 | N294 | ARID (AT-Rich | g 5257005 Rb binding | MOTIFS |
| | | | S1063 S1067 | N432 | Interaction Domain) | protein homolog | BLAST_GENBANK |
| | | | S1128 S1129 | N755 | DNA binding domain: | | HMMER-PFAM |
| | | | S1135 S1153 | N856 | E303-V413 | | BLAST-PRODOM |
| | | | S1159 S1181 | N859 | Retinoblastoma binding | | BLAST-DOMO |
| | | | S1208 S1222 | N910 | protein: T742-R1312 | | |
| | | | S1249 S157 S158 | N1151 | | | |
| | | | S159 S17 S216 | N1226 | | | |
| | | | S274 S276 S295 | | | | |
| | | | S296 S47 S471 | | | | |
| | | | S483 S527 S591 | | | | |
| | | | S595 S656 S666 | | | | |
| | | | S680 S712 S713 | | | | |
| | | | S717 S736 S750 | | | | |
| | | | S758 S815 S860 | | | | |
| | | | S861 S862 S888 | | | | |
| | | | S945 S947 T100 | | | | |
| | | | T1025 T1034 | | | | |
| | | | T1046 T1228 | | | | |
| | | | T126 T1293 T140 | | | | |
| | | | T31 T41 T481 | | | | |
| | | | T507 T508 T531 | | | | |
| | | | T793 T801 T811 | | | | |
| | | | T812 T876 T939 | | | | |
| | | | T971 Y655 Y75 | | | | |
| | | | Y89 Y9 | | | | |
| 96 | 4909754 | 504 | S109 S181 S304 | N309 | Transcription factor- | g476099 transcription | MOTIFS |
| | | | S357 S36 S384 | N355 | like domain: T20-L120 | factor LSF | BLAST_GENBANK |
| | | | S389 S417 T194 | N421 | Lymphoid transcription | | BLIMPS_PRINTS |
| | | | T212 T246 T255 | | factor ENL: P10-N209 | | BLAST-PRODOM |
| | | | T323 T333 T365 | | P245 purinoceptor | | BLAST-DOMO |
| | | | T490 Y221 Y262 | | signature: F121-K131 | | |
| | | | Y85 | | | | |
| 97 | 4911931 | 227 | T190 S191 T157 | | Transcription factor- | g3878581 Similar to | MOTIFS |
| | | | Y62 | | like domain: T20-L120 | Human AF-9 leukemia | BLAST_GENBANK |
| | | | | | Lymphoid transcription | protein | BLAST-PRODOM |
| | | | | | factor ENL: P10-N209 | | BLAST-DOMO |
| | | | | | P245 purinoceptor | | |
| | | | | | signature: F121-K131 | | |
| 98 | 4920433 | 233 | S43 S50 T62 S77 | N122 | Signal peptide: M1- | | SPSCAN |
| | | | S110 S131 T165 | N192 | A33 | | MOTIFS |
| | | | S17 T69 S194 | | LysR helix-turn helix | | |
| | | | Y191 | | domain: T97-N122 | | |
| 99 | 5042113 | 511 | S176 S203 S276 | | Signal peptide: M1- | | MOTIFS |
| | | | S278 S430 S436 | | A34 | | SPSCAN |
| | | | S455 S56 S99 | | Brain natriuretic | | BLIMPS-PRINTS |
| | | | T12 T173 T239 | | peptide: A481-Q499 | | |
| | | | T247 T274 T372 | | | | |
| | | | T449 T504 T509 | | | | |
| | | | Y79 | | | | |
| 100 | 5083853 | 247 | S102 S110 S123 | | C-type natriuretic | g 4519621 OASIS | MOTIFS |
| | | | S19 S190 S58 | | peptide: S44-D54 | (transcription factor) | BLAST_GENBANK |
| | | | S84 T150 T163 | | | protein | |
| | | | T212 | | | | |
| 101 | 5283981 | 276 | S160 T68 T126 | N20 | C2H2 Zn finger domain: | g 5001720 odd-skipped | MOTIFS |
| | | | T168 T193 | | K170-H190, F172-H194, | related 1 protein | BLAST_GENBANK |
| | | | | | C174-H194, L187-D196, | | HMMER-PFAM |
| | | | | | E191-H246, Y200-H222, | | BLIMPS-BLOCKS |
| | | | | | F228-H250, C202-H218, | | BLIMPS-PRINTS |
| | | | | | S223-Q252, P227-S240. | | BLAST-PRODOM |
| | | | | | C230-H250 | | BLAST-DOMO |
| 102 | 5510549 | 220 | S66 T144 S173 | N202 | C3HC4 Zn finger | g9759106 | MOTIFS |
| | | | T67 S153 | | domain: C168-C208, | contains similarity to | BLAST_GENBANK |
| | | | | | E164-A219, C168-D211 | C3HC4-type RING zinc | HMMER-PFAM |
| | | | | | | finger protein | PROFILESCAN |
| | | | | | | Sato, S. et al. (1997) | BLAST-DOMO |
| | | | | | | DNA Res. 4: 215-230 | |
| 103 | 5544862 | 608 | S16 S25 S326 | N29 | Small proline rich | | MOTIFS |
| | | | S401 S416 S423 | N251 | protein DNA binding | | BLIMPS-PRINTS |
| | | | S424 S44 S481 | N538 | signature: | | |
| | | | S51 S517 S518 | | E48-P57, P230-P238 | | |
| | | | S530 S543 S553 | | Leucine zipper: L63- | | |
| | | | S566 S574 S597 | | L84 | | |
| | | | T118 T182 T256 | | | | |
| | | | T402 T437 T494 | | | | |
| | | | Y552 Y579 | | | | |
| 104 | 5573394 | 653 | G650 S299 S371 | N115 | Nonstructural | | MOTIFS |
| | | | S499 S552 S593 | N220 | polyprotein domain: | | BLAST_DOMO |
| | | | S599 S78 T240 | N293 | L118-K284 | | |
| | | | T262 T270 T300 | N597 | | | |
| | | | T381 T432 T525 | | | | |
| | | | T53 T57 T9 | | | | |
| 105 | 5850840 | 154 | T9 S19 S25 T30 | | C3HC4 Zn finger | g 3873857 similar to | MOTIFS |
| | | | T63 S138 S149 | | domain: C99-C139, K95- | C3HC4 type zinc finger | BLAST_GENBANK |
| | | | S21 S92 | | S150 | | HMMER-PFAM |
| | | | | | | | PROFILESCAN |
| 106 | 5942936 | 337 | T8 S10 S12 S67 | N25 N65 | Helix-loop-helix DNA | g 5059323 hairy and | MOTIFS |
| | | | T77 S138 T214 | | binding domain: R49- | enhancer of split | BLAST_GENBANK |
| | | | S84 T162 | | E132, K51-Q104, E57- | related-1 | HMMER-PFAM |
| | | | | | R72, S84-Q104, E88- | | BLIMPS-BLOCKS |
| | | | | | L103 | | BLAST-DOMO |
| 107 | 5951431 | 535 | S152 S201 S212 | N6 N87 | Signal peptide: M1- | g9651765 | MOTIFS |
| | | | S254 S256 S287 | N137 | R54 | zinc finger protein | BLAST_GENBANK |
| | | | S348 S351 S354 | | GATA-type Zn finger | 289 [Mus musculus] | HMMER_PFAM |
| | | | S378 S385 S409 | | domain: A19-W74, M1- | | SPSCAN |
| | | | S414 S428 S475 | | H95 | | BLAST-PRODOM |
| | | | S527 T22 T418 | | | | BLAST-DOMO |
| | | | T66 T98 Y210 | | | | |
| | | | Y459 | | | | |

[0355] TABLE 3

| Nucleotide SEQ | | Tissue Expression | Disease or Condition | |
|---|---|---|---|---|
| ID NO: | | (Fraction of Total) | (Fraction of Total) | Vector |
| 108 | 095210 | Reproductive (0.257) | Cancer (0.429) | PBLUESCRIPT |
| | | Hematopoietic/Immune (0.200) | Inflammation (0.257) | |
| | | Nervous (0.171) | Cell Proliferation (0.143) | |
| 109 | 157953 | Reproductive (0.293) | Cancer (0.483) | PBLUESCRIPT |
| | | Hematopoietic/Immune (0.207) | Cell Proliferation (0.310) | |
| | | Gastrointestinal (0.172) | Inflammation (0.224) | |
| 110 | 159196 | Reproductive (0.296) | Cancer (0.444) | PBLUESCRIPT |
| | | Cardiovascular (0.222) | Inflammation (0.370) | |
| | | Hematopoietic/Immune (0.111) | Cell Proliferation (0.222) | |
| | | Gastrointestinal (0.111) | | |
| | | Urologic (0.111) | | |
| 111 | 343338 | Hematopoietic/Immune (0.300) | Cancer (0.380) | PBLUESCRIPT |
| | | Nervous (0.260) | Inflammation (0.320) | |
| | | Reproductive (0.140) | Cell Proliferation (0.220) | |
| 112 | 402386 | Hematopoietic/Immune (0.381) | Inflammation (0.476) | PBLUESCRIPT |
| | | Reproductive (0.190) | Cancer (0.333) | |
| | | Gastrointestinal (0.143) | | |
| | | Nervous (0.143) | | |
| 113 | 456487 | Reproductive (0.248) | Cancer (0.488) | PBLUESCRIPT |
| | | Nervous (0.198) | Inflammation (0.207) | |
| | | Gastrointestinal (0.132) | Cell Proliferation (0.165) | |
| 114 | 490256 | Developmental (0.231) | Cancer (0.231) | PBLUESCRIPT |
| | | Reproductive (0.231) | Cell Proliferation (0.231) | |
| | | Endocrine (0.154) | Inflammation (0.231) | |
| | | Hematopoietic/Immune (0.154) | | |
| | | Gastrointestinal (0.154) | | |
| 115 | 494740 | Gastrointestinal (0.209) | Inflammation (0.395) | PBLUESCRIPT |
| | | Nervous (0.209) | Cancer (0.302) | |
| | | Hematopoietic/Immune (0.186) | Cell Proliferation (0.209) | |
| 116 | 507475 | Reproductive (0.246) | Cancer (0.426) | PBLUESCRIPT |
| | | Hematopoietic/Immune (0.180) | Cell Proliferation (0.230) | |
| | | Gastrointestinal (0.148) | Inflammation (0.230) | |
| 117 | 531581 | Hematopoietic/Immune (0.231) | Cancer (0.385) | PSPORT1 |
| | | Reproductive (0.231) | Cell Proliferation (0.231) | |
| | | Nervous (0.154) | Inflammation (0.205) | |
| 118 | 675190 | Reproductive (0.389) | Cancer (0.722) | PSPORT1 |
| | | Nervous (0.278) | Inflammation (0.111) | |
| | | Cardiovascular (0.111) | Trauma (0.111) | |
| | | Urologic (0.111) | | |
| 119 | 685434 | Reproductive (0.333) | Cancer (0.556) | PSPORT1 |
| | | Nervous (0.194) | Inflammation (0.278) | |
| | | Cardiovascular (0.111) | Cell Proliferation (0.111) | |
| | | Hematopoietic/Immune (0.111) | | |
| 120 | 788663 | Reproductive (0.303) | Cancer (0.455) | PSPORT1 |
| | | Cardiovascular (0.182) | Inflammation (0.303) | |
| | | Hematopoietic/Immune (0.152) | Cell Proliferation (0.212) | |
| 121 | 870100 | Reproductive (0.298) | Cancer (0.660) | PSPORT1 |
| | | Nervous (0.170) | Inflammation (0.170) | |
| | | Cardiovascular (0.128) | Cell Proliferation (0.149) | |
| 122 | 879500 | Reproductive (0.203) | Cancer (0.373) | PSPORT1 |
| | | Gastrointestinal (0.153) | Inflammation (0.322) | |
| | | Hematopoietic/Immune (0.136) | Cell Proliferation (0.203) | |
| 123 | 975377 | Reproductive (0.215) | Cancer (0.418) | PSPORT1 |
| | | Nervous (0.177) | Inflammation (0.291) | |
| | | Hematopoietic/Immune (0.152) | Cell Proliferation (0.127) | |
| 124 | 1208721 | Reproductive (0.282) | Cancer (0.471) | PSPORT1 |
| | | Nervous (0.200) | Inflammation (0.282) | |
| | | Hematopoietic/Immune (0.141) | Cell Proliferation (0.141) | |
| 125 | 1234329 | Reproductive (0.277) | Cancer (0.553) | pINCY |
| | | Nervous (0.191) | Cell Proliferation (0.234) | |
| | | Cardiovascular (0.128) | Inflammation (0.213) | |
| | | Hematopoietic/Immune (0.128) | | |
| 126 | 1238747 | Hematopoietic/Immune (0.283) | Cancer (0.400) | PSPORT1 |
| | | Gastrointestinal (0.167) | Inflammation (0.300) | |
| | | Reproductive (0.150) | Trauma (0.117) | |
| | | | Cell Proliferation (0.117) | |
| 127 | 1265980 | Nervous (0.900) | Cell Proliferation (0.400) | pINCY |
| | | Developmental (0.100) | Inflammation (0.200) | |
| | | | Neurological (0.200) | |
| 128 | 1297333 | Developmental (0.273) | Cell Proliferation (0.273) | pINCY |
| | | Reproductive (0.273) | Inflammation (0.273) | |
| | | Hematopoietic/Immune (0.273) | Cancer (0.182) | |
| 129 | 1312824 | Reproductive (0.238) | Cancer (0.429) | pINCY |
| | | Hematopoietic/Immune (0.222) | Inflammation (0.238) | |
| | | Gastrointestinal (0.159) | Cell Proliferation (0.175) | |
| 130 | 1359294 | Reproductive (0.219) | Cancer (0.438) | pINCY |
| | | Nervous (0.157) | Inflammation (0.247) | |
| | | Gastrointestinal (0.145) | Cell Proliferation (0.188) | |
| 131 | 1377380 | Reproductive (0.385) | Cancer (0.538) | pINCY |
| | | Developmental (0.231) | Cell Proliferation (0.385) | |
| | | Hematopoietic/Immune (0.231) | Inflammation (0.154) | |
| 132 | 1383473 | Reproductive (0.318) | Cancer (0.515) | pINCY |
| | | Nervous (0.182) | Inflammation (0.288) | |
| | | Hematopoietic/Immune (0.121) | Cell Proliferation (0.197) | |
| 133 | 1388860 | Cardiovascular (0.167) | Cancer (0.444) | pINCY |
| | | Nervous (0.167) | Inflammation (0.222) | |
| | | Reproductive (0.167) | Cell Proliferation (0.167) | |
| | | | Trauma (0.167) | |
| 134 | 1395322 | Nervous (0.261) | Cancer (0.478) | pINCY |
| | | Reproductive (0.261) | Inflammation (0.304) | |
| | | | Cell Proliferation (0.130) | |
| | | | Trauma (0.130) | |
| 135 | 1419370 | Reproductive (0.290) | Cancer (0.522) | pINCY |
| | | Nervous (0.246) | Cell Proliferation (0.188) | |
| | | Gastrointestinal (0.116) | Inflammation (0.130) | |
| 136 | 1429773 | Reproductive (0.255) | Cancer (0.521) | pINCY |
| | | Gastrointestinal (0.160) | Inflammation (0.191) | |
| | | Cardiovascular (0.128) | Cell Proliferation (0.170) | |
| 137 | 1470820 | Reproductive (0.231) | Cancer (0.385) | pINCY |
| | | Developmental (0.154) | Cell Proliferation (0.231) | |
| | | Gastrointestinal (0.154) | Inflammation (0.231) | |
| | | Hematopoietic/Immune (0.154) | | |
| | | Nervous (0.154) | | |
| | | Gastrointestinal (0.154) | | |
| 138 | 1483455 | Nervous (0.222) | Cancer (0.422) | pINCY |
| | | Urologic (0.156) | Cell Proliferation (0.244) | |
| | | Cardiovascular (0.111) | Inflammation (0.244) | |
| | | Developmental (0.111) | | |
| | | Reproductive (0.111) | | |
| 139 | 1527064 | Reproductive (0.262) | Cancer (0.481) | PBLUESCRIPT |
| | | Nervous (0.169) | Cell Proliferation (0.257) | |
| | | Cardiovascular (0.131) | Inflammation (0.224) | |
| 140 | 1557491 | Nervous (0.222) | Cancer (0.444) | pINCY |
| | | Reproductive (0.222) | Neurological (0.167) | |
| | | Cardiovascular (0.167) | Cell Proliferation (0.111) | |
| | | | Inflammation (0.111) | |
| 141 | 1576862 | Gastrointestinal (0.280) | Cancer (0.480) | pINCY |
| | | Hematopoietic/Immune (0.240) | Inflammation (0.320) | |
| | | Nervous (0.160) | Cell Proliferation (0.120) | |
| 142 | 1609731 | Gastrointestinal (0.286) | Cancer (0.429) | pINCY |
| | | Nervous (0.286) | Cell Proliferation (0.286) | |
| | | Cardiovascular (0.143) | Neurological (0.143) | |
| | | Developmental (0.143) | Trauma (0.143) | |
| | | Urologic (0.143) | | |
| 143 | 1674538 | Nervous (0.364) | Cancer (0.364) | pINCY |
| | | Cardiovascular (0.364) | Cell Proliferation (0.182) | |
| | | Gastrointestinal (0.182) | | |
| 144 | 1675287 | Reproductive (0.373) | Cancer (0.492) | pINCY |
| | | Hematopoietic/Immune (0.169) | Inflammation (0.305) | |
| | | Urologic (0.119) | Cell Proliferation (0.153) | |
| 145 | 1693903 | Reproductive (0.212) | Cancer (0.434) | pINCY |
| | | Hematopoietic/Immune (0.186) | Inflammation (0.327) | |
| | | Nervous (0.177) | Cell Proliferation (0.257) | |
| 146 | 1702962 | Reproductive (0.389) | Cancer (0.556) | pINCY |
| | | Cardiovascular (0.167) | Trauma (0.222) | |
| | | Gastrointestinal (0.167) | | |
| 147 | 1712916 | Reproductive (1.000) | Cancer (1.000) | pINCY |
| 148 | 1748313 | Nervous (0.265) | Cancer (0.456) | pINCY |
| | | Reproductive (0.162) | Inflammation (0.279) | |
| | | Hematopoietic/Immune (0.147) | Cell Proliferation (0.176) | |
| 149 | 1754833 | Hematopoietic/Immune (0.208) | Inflammation (0.377) | pINCY |
| | | Gastrointestinal (0.189) | Cancer (0.358) | |
| | | Nervous (0.151) | Cell Proliferation (0.170) | |
| 150 | 1798701 | Nervous (0.237) | Cancer (0.449) | pINCY |
| | | Reproductive (0.212) | Inflammation (0.237) | |
| | | Gastrointestinal (0.119) | Cell Proliferation (0.178) | |
| 151 | 1842496 | Reproductive (0.254) | Cancer (0.500) | PSPORT1 |
| | | Nervous (0.187) | Cell Proliferation (0.224) | |
| | | Gastrointestinal (0.119) | Inflammation (0.149) | |
| 152 | 1868613 | Hematopoietic/Immune (0.286) | Cell Proliferation (0.486) | pINCY |
| | | Reproductive (0.257) | Cancer (0.400) | |
| | | Cardiovascular (0.114) | Inflammation (0.286) | |
| | | Gastrointestinal (0.114) | | |
| 153 | 1870609 | Nervous (0.207) | Cancer (0.439) | pINCY |
| | | Reproductive (0.195) | Inflammation (0.244) | |
| | | Gastrointestinal (0.159) | Cell Proliferation (0.171) | |
| 154 | 1871961 | Reproductive (0.268) | Cancer (0.474) | pINCY |
| | | Nervous (0.196) | Cell Proliferation (0.247) | |
| | | Hematopoietic/Immune (0.113) | Inflammation (0.165) | |
| 155 | 1876258 | Hematopoietic/Immune (0.600) | Inflammation (0.400) | pINCY |
| | | Cardiovascular (0.200) | Trauma (0.200) | |
| | | Reproductive (0.100) | Cancer (0.100) | |
| | | Gastrointestinal (0.100) | | |
| 156 | 1929822 | Reproductive (0.255) | Cancer (0.479) | pINCY |
| | | Nervous (0.160) | Inflammation (0.223) | |
| | | Hematopoietic/Immune (0.128) | Cell Proliferation (0.213) | |
| | | Gastrointestinal (0.128) | | |
| 157 | 1970095 | Nervous (0.205) | Cancer (0.385) | PBLUESCRIPT |
| | | Reproductive (0.205) | Inflammation (0.256) | |
| | | Cardiovascular (0.133) | Cell Proliferation (0.159) | |
| 158 | 1975473 | Gastrointestinal (0.464) | Cancer (0.536) | pINCY |
| | | Reproductive (0.250) | Inflammation (0.214) | |
| | | | Cell Proliferation (0.179) | |
| 159 | 1976527 | Reproductive (0.247) | Cancer (0.466) | pINCY |
| | | Gastrointestinal (0.192) | Inflammation (0.247) | |
| | | Nervous (0.178) | Cell Proliferation (0.233) | |
| 160 | 2108023 | Reproductive (0.750) | Cancer (0.500) | PSPORT1 |
| | | Nervous (0.250) | Inflammation (0.250) | |
| | | | Trauma (0.250) | |
| 161 | 2135746 | Nervous (0.321) | Cancer (0.500) | pINCY |
| | | Cardiovascular (0.214) | Inflammation (0.214) | |
| | | Reproductive (0.143) | Trauma (0.179) | |
| 162 | 2154810 | Cardiovascular (0.222) | Cancer (0.333) | pINCY |
| | | Developmental (0.222) | Cell Proliferation (0.333) | |
| | | Hematopoietic/Immune (0.222) | Inflammation (0.222) | |
| 163 | 2228991 | Hematopoietic/Immune (0.500) | Inflammation (0.333) | pINCY |
| | | Gastrointestinal (0.167) | Cancer (0.250) | |
| | | Reproductive (0.167) | Cell Proliferation (0.167) | |
| 164 | 2241206 | Cardiovascular (0.269) | Cancer (0.346) | pINCY |
| | | Gastrointestinal (0.154) | Cell Proliferation (0.346) | |
| | | Nervous (0.154) | Inflammation (0.308) | |
| 165 | 2259590 | Reproductive (0.375) | Cancer (0.500) | PSPORT1 |
| | | Urologic (0.250) | Cell Proliferation (0.250) | |
| | | Hematopoietic/Immune (0.125) | Inflammation (0.250) | |
| | | Developmental (0.125) | | |
| | | Endocrine (0.125) | | |
| 166 | 2307537 | Reproductive (0.241) | Cancer (0.414) | PSPORT1 |
| | | Gastrointestinal (0.138) | Cell Proliferation (0.241) | |
| | | Nervous (0.138) | Inflammation (0.241) | |
| 167 | 2440675 | Hematopoietic/Immune (0.600) | Inflammation (0.400) | pINCY |
| | | Cardiovascular (0.200) | Trauma (0.200) | |
| | | Reproductive (0.100) | Cell Proliferation (0.100) | |
| | | Gastrointestinal (0.100) | Cancer (0.100) | |
| 168 | 2463542 | Reproductive (0.333) | Cancer (0.542) | pINCY |
| | | Nervous (0.250) | Inflammation (0.292) | |
| | | Hematopoietic/Immune (0.125) | Trauma (0.125) | |
| 169 | 2486031 | Reproductive (0.333) | Cancer (0.333) | pINCY |
| | | Cardiovascular (0.167) | Cell Proliferation (0.250) | |
| | | Gastrointestinal (0.167) | | |
| | | Nervous (0.167) | | |
| 170 | 2493052 | Nervous (0.200) | Cancer (0.429) | pINCY |
| | | Gastrointestinal (0.171) | Cell Proliferation (0.343) | |
| | | Reproductive (0.171) | Inflammation (0.229) | |
| 171 | 2512074 | Hematopoietic/Immune (0.333) | Inflammation (0.500) | pINCY |
| | | Reproductive (0.333) | Cancer (0.417) | |
| | | Nervous (0.250) | Cell Proliferation (0.333) | |
| 172 | 2646274 | Gastrointestinal (0.207) | Cancer (0.379) | pINCY |
| | | Reproductive (0.207) | Inflammation (0.310) | |
| | | Developmental (0.138) | Cell Proliferation (0.207) | |
| 173 | 2672566 | Nervous (0.400) | Cancer (0.600) | pINCY |
| | | Gastrointestinal (0.200) | Cell Proliferation (0.100) | |
| | | Cardiovascular (0.100) | Inflammation (0.100) | |
| | | Hematopoietic/Immune (0.100) | Neurological (0.100) | |
| | | Reproductive (0.100) | | |
| 174 | 2689674 | Gastrointestinal (0.191) | Cancer (0.489) | pINCY |
| | | Reproductive (0.191) | Inflammation (0.191) | |
| | | Hematopoietic/Immune (0.170) | Cell Proliferation (0.149) | |
| 175 | 2703282 | Reproductive (0.409) | Cancer (0.409) | pINCY |
| | | Nervous (0.136) | Inflammation (0.386) | |
| | | Gastrointestinal (0.114) | Cell Proliferation (0.205) | |
| | | Hematopoietic/Immune (0.114) | | |
| 176 | 2738293 | Reproductive (0.333) | Cancer (0.416) | pINCY |
| | | Cardiovascular (0.167) | Cell Proliferation (0.167) | |
| | | Gastrointestinal (0.167) | Inflammation (0.167) | |
| | | | Trauma (0.167) | |
| 177 | 2772776 | Reproductive (0.232) | Cancer (0.500) | pINCY |
| | | Gastrointestinal (0.152) | Inflammation (0.205) | |
| | | Nervous (0.134) | Cell Proliferation (0.152) | |
| 178 | 2774476 | Gastrointestinal (0.712) | Trauma (0.429) | pINCY |
| | | Developmental (0.143) | Cancer (0.286) | |
| | | Nervous (0.143) | Cell Proliferation (0.286) | |
| 179 | 2804624 | Reproductive (0.252) | Cancer (0.480) | pINCY |
| | | Gastrointestinal (0.173) | Inflammation (0.236) | |
| | | Cardiovascular (0.150) | Trauma (0.134) | |
| 180 | 2848225 | Reproductive (0.385) | Cancer (0.385) | pINCY |
| | | Hematopoietic/Immune (0.231) | Trauma (0.308) | |
| | | Gastrointestinal (0.154) | Cell Proliferation (0.154) | |
| | | | Inflammation (0.154) | |
| 181 | 2882241 | Hematopoietic/Immune (0.259) | Cancer (0.519) | pINCY |
| | | Gastrointestinal (0.185) | Inflammation (0.333) | |
| | | Reproductive (0.185) | Cell Proliferation (0.148) | |
| 182 | 2939011 | Hematopoietic/Immune (0.263) | Cancer (0.316) | pINCY |
| | | Cardiovascular (0.158) | Cell Proliferation (0.316) | |
| | | Gastrointestinal (0.158) | Inflammation (0.316) | |
| | | Urologic (0.158) | | |
| | | Nervous (0.158) | | |
| 183 | 2947188 | Nervous (0.308) | Cancer (0.346) | pINCY |
| | | Gastrointestinal (0.154) | Inflammation (0.308) | |
| | | Reproductive (0.154) | Cell Proliferation (0.154) | |
| | | | Trauma (0.154) | |
| 184 | 3094001 | Reproductive (0.266) | Cancer (0.500) | pINCY |
| | | Gastrointestinal (0.160) | Inflammation (0.223) | |
| | | Nervous (0.160) | Cell Proliferation (0.160) | |
| 185 | 3110061 | Cardiovascular (0.333) | Inflammation (0.467) | pINCY |
| | | Hematopoietic/Immune (0.267) | Cancer (0.400) | |
| | | Nervous (0.200) | Cell Proliferation (0.267) | |
| | | Reproductive (0.200) | | |
| 186 | 3146614 | Reproductive (0.326) | Cancer (0.512) | pINCY |
| | | Nervous (0.209) | Inflammation (0.186) | |
| | | Gastrointestinal (0.163) | | |
| 187 | 3295381 | Hematopoietic/Immune (0.267) | Cancer (0.533) | pINCY |
| | | Musculoskeletal (0.200) | Inflammation (0.400) | |
| | | Reproductive (0.200) | | |
| 188 | 3364774 | Nervous (0.375) | Cancer (0.583) | pINCY |
| | | Gastrointestinal (0.208) | Cell Proliferation (0.250) | |
| | | Reproductive (0.167) | | |
| 189 | 3397777 | Reproductive (0.231) | Cancer (0.462) | pINCY |
| | | Cardiovascular (0.154) | Inflammation (0.385) | |
| | | Gastrointestinal (0.154) | | |
| | | Endocrine (0.154) | | |
| | | Hematopoietic/Immune (0.154) | | |
| 190 | 3403046 | Reproductive (0.500) | Cancer (0.500) | pINCY |
| | | Hematopoietic/Immune (0.250) | Inflammation (0.250) | |
| | | Nervous (0.250) | | |
| 191 | 3538506 | Reproductive (0.438) | Cancer (0.625) | pINCY |
| | | Gastrointestinal (0.188) | Trauma (0.250) | |
| | | Hematopoietic/Immune (0.188) | Cell Proliferation (0.188) | |
| | | Nervous (0.188) | | |
| 192 | 3575519 | Cardiovascular (0.455) | Trauma (0.455) | pINCY |
| | | Musculoskeletal (0.273) | Cancer (0.273) | |
| 193 | 3598694 | Nervous (0.247) | Cancer (0.575) | pINCY |
| | | Reproductive (0.247) | Cell Proliferation (0.233) | |
| | | | Inflammation (0.110) | |
| 194 | 3638819 | Reproductive (0.333) | Cancer (0.556) | pINCY |
| | | Nervous (0.222) | Inflammation (0.185) | |
| | | Gastrointestinal (0.111) | | |
| 195 | 3717139 | Hematopoietic/Immune (0.500) | Cancer (0.500) | pINCY |
| | | Reproductive (0.500) | Inflammation (0.500) | |
| 196 | 3892962 | Reproductive (0.455) | Cancer (0.909) | pINCY |
| | | Musculoskeletal (0.182) | Cell Proliferation (0.182) | |
| | | Nervous (0.182) | | |
| 197 | 4153521 | Nervous (0.281) | Cancer (0.453) | pINCY |
| | | Urologic (0.156) | Inflammation (0.203) | |
| | | Reproductive (0.141) | Cell Proliferation (0.156) | |
| 198 | 4585038 | Cardiovascular (0.261) | Cancer (0.261) | pINCY |
| | | Nervous (0.261) | Inflammation (0.261) | |
| | | Hematopoietic/Immune (0.174) | Cell Proliferation (0.130) | |
| | | | Trauma (0.130) | |
| 199 | 4674640 | Nervous (0.283) | Cancer (0.391) | pINCY |
| | | Reproductive (0.239) | Inflammation (0.304) | |
| | | Gastrointestinal (0.174) | Cell Proliferation (0.109) | |
| | | | Neurological (0.109) | |
| 200 | 4676066 | Reproductive (0.317) | Cancer (0.508) | pINCY |
| | | Cardiovascular (0.175) | Inflammation (0.159) | |
| | | Gastrointestinal (0.175) | Trauma (0.127) | |
| | | Nervous (0.175) | | |
| 201 | 4830687 | Reproductive (0.276) | Cancer (0.482) | pINCY |
| | | Gastrointestinal (0.147) | Cell Proliferation (0.218) | |
| | | Nervous (0.147) | Inflammation (0.194) | |
| 202 | 4880891 | Hematopoietic/Immune (0.190) | Cancer (0.381) | pINCY |
| | | Gastrointestinal (0.159) | Inflammation (0.333) | |
| | | Nervous (0.159) | Cell Proliferation (0.222) | |
| 203 | 4909754 | Reproductive (0.333) | Cancer (0.381) | pINCY |
| | | Hematopoietic/Immune (0.190) | Inflammation (0.333) | |
| | | Gastrointestinal (0.143) | Cell Proliferation (0.286) | |
| 204 | 4911931 | Nervous (0.219) | Cancer (0.375) | pINCY |
| | | Hematopoietic/Immune (0.188) | Cell Proliferation (0.312) | |
| | | Reproductive (0.125) | Inflammation (0.219) | |
| | | Cardiovascular (0.125) | | |
| 205 | 4920433 | Reproductive (1.000) | Inflammation (1.000) | pINCY |
| 206 | 5042113 | Gastrointestinal (0.206) | Cancer (0.413) | pINCY |
| | | Reproductive (0.159) | Inflammation (0.206) | |
| | | Nervous (0.159) | Cell Proliferation (0.190) | |
| 207 | 5083853 | Gastrointestinal (0.250) | Cancer (0.375) | pINCY |
| | | Hematopoietic/Immune (0.250) | Inflammation (0.375) | |
| | | Musculoskeletal (0.125) | Neurological (0.125) | |
| | | Reproductive (0.125) | | |
| | | Cardiovascular (0.125) | | |
| | | Nervous (0.125) | | |
| 208 | 5283981 | Reproductive (0.686) | Cancer (0.514) | pINCY |
| | | | Inflammation (0.171) | |
| | | | Cell proliferation (0.114) | |
| 209 | 5510549 | Hematopoietic/Immune (0.222) | Cancer (0.593) | pINCY |
| | | Reproductive (0.222) | Inflammation (0.148) | |
| | | Nervous (0.148) | Trauma (0.111) | |
| | | | Cell Proliferation (0.111) | |
| 210 | 5544862 | Endocrine (0.222) | Trauma (0.333) | pINCY |
| | | Nervous (0.222) | Inflammation (0.222) | |
| | | Reproductive (0.222) | Cell Proliferation (0.111) | |
| | | Gastrointestinal (0.111) | Neurological (0.111) | |
| | | Hematopoietic/Immune (0.111) | Cancer (0.111) | |
| 211 | 5573394 | Reproductive (0.194) | Cancer (0.463) | pINCY |
| | | Cardiovascular (0.149) | Inflammation (0.343) | |
| | | Hematopoietic/Immune (0.149) | Cell Proliferation (0.164) | |
| 212 | 5850840 | Nervous (0.295) | Cancer (0.416) | pINCY |
| | | Reproductive (0.268) | Inflammation (0.208) | |
| | | Cardiovascular (0.128) | Cell Proliferation (0.134) | |
| 213 | 5942936 | Nervous (0.444) | Cancer (0.556) | pINCY |
| | | Reproductive (0.333) | Inflammation (0.333) | |
| | | Cardiovascular (0.111) | Neurological (0.111) | |
| | | Musculoskeletal (0.111) | Trauma (0.111) | |
| 214 | 5951431 | Reproductive (0.317) | Cancer (0.518) | pINCY |
| | | Nervous (0.194) | Inflammation (0.194) | |
| | | Gastrointestinal (0.151) | Cell Proliferation (0.180) | |

[0356] TABLE 4

| Nucleotide | | | |
|---|---|---|---|
| SEQ ID NO: | | Library | Library Description |
| 108 | 095210 | PITUNOT01 | Library was constructed using RNA isolated from pituitary glands removed from a pool |
| | | | of 18 male and female Caucasian donors, 16 to 70 years old, who died from trauma. (RNA |
| | | | came from Clontech.) |
| 109 | 157953 | THP1PLB02 | Library was constructed by reamplification of a library made using RNA isolated from |
| | | | THP-1 cells cultured for 48 hours with 100 ng/ml phorbol ester (PMA), followed by a 4- |
| | | | hour culture in media containing 1 ug/ml LPS. THP-1 is a human promonocyte line |
| | | | derived from the peripheral blood of a 1-year-old male with acute monocytic leukemia. |
| | | | One million primary clones were amplified following phage packaging. |
| 110 | 159196 | ADENINB01 | Library was constructed using RNA isolated from the inflamed adenoid tissue of a 3- |
| | | | year-old child. (RNA came from Clontech.) |
| 111 | 343338 | THYMNOT02 | Library was constructed using RNA isolated from thymus tissue removed from a 3-year- |
| | | | old Caucasian male, who died from drowning. |
| 112 | 402386 | TMLR3DT01 | Library was constructed using RNA isolated from non-adherent and adherent peripheral |
| | | | blood mononuclear cells collected from two unrelated Caucasian male donors (25 and 29 |
| | | | years old). |
| 113 | 456487 | KERANOT01 | Library was constructed using RNA isolated from neonatal keratinocytes obtained from |
| | | | the leg skin of a spontaneously aborted black male. |
| 114 | 490256 | HNT2AGT01 | Library was constructed at Stratagene (STR937233), using RNA isolated from the hNT2 |
| | | | cell line derived from a human teratocarcinoma that exhibited properties |
| | | | characteristic of a committed neuronal precursor. Cells were treated with retinoic |
| | | | acid for 5 weeks, with mitotic inhibitors for two weeks and allowed to mature for an |
| | | | additional 4 weeks in conditioned medium. |
| 115 | 494740 | HNT2NOT01 | Library was constructed at Stratagene (STR937230), using RNA isolated from the hNT2 |
| | | | cell line (derived from a human teratocarcinoma that exhibited properties |
| | | | characteristic of a committed neuronal precursor). |
| 116 | 507475 | TMLR3DT01 | Library was constructed using RNA isolated from non-adherent and adherent peripheral |
| | | | blood mononuclear cells collected from two unrelated Caucasian male donors (25 and 29 |
| | | | years old). |
| 117 | 531581 | BRAINOT03 | Library was constructed using RNA isolated from brain tissue removed from a 26-year- |
| | | | old Caucasian male during cranioplasty and excision of a cerebral meningeal lesion. |
| | | | Pathology for the associated tumor tissue indicated a grade 4 oligoastrocytoma in the |
| | | | right fronto-parietal part of the brain. |
| 118 | 675190 | CRBLNOT01 | Library was constructed using RNA isolated from the cerebellum tissue of a 69-year-old |
| | | | Caucasian male who died from chronic obstructive pulmonary disease. Patient history |
| | | | included myocardial infarction, hypertension, and osteoarthritis. |
| 119 | 685434 | UTRSNOT02 | Library was constructed using RNA isolated from uterine tissue removed from a 34-year- |
| | | | old Caucasian female during a vaginal hysterectomy. Patient history included mitral |
| | | | valve disorder. Family history included stomach cancer, congenital heart anomaly, |
| | | | irritable bowel syndrome, ulcerative colitis, colon cancer, cerebrovascular disease, |
| | | | type II diabetes, and depression. |
| 120 | 788663 | PROSNOT05 | Library was constructed using RNA isolated from diseased prostate tissue removed from |
| | | | a 67-year-old Caucasian male during radical prostatectomy and lymph node biopsy. This |
| | | | library has been determined to contain some tumor cells. Pathology indicated |
| | | | adenofibromatous hyperplasia was present. Pathology for the associated tumor tissue |
| | | | indicated adenocarcinoma Gleason grade 3 + 3. Patient history included coronary artery |
| | | | disease, stomach ulcer, and osteoarthritis. Family history included congestive heart |
| | | | failure. |
| 121 | 870100 | LUNGAST01 | Library was constructed using RNA isolated from the lung tissue of a 17-year-old |
| | | | Caucasian male, who died from head trauma. Patient history included asthma. |
| 122 | 879500 | THYRNOT02 | Library was constructed using RNA isolated from the diseased thyroid tissue of a 16- |
| | | | year-old Caucasian female with Graves' disease (hyperthyroidism). |
| 123 | 975377 | MUSCNOT02 | Library was constructed using RNA isolated from the psoas muscle tissue of a 12-year- |
| | | | old Caucasian male. |
| 124 | 1208721 | BRSTNOT02 | Library was constructed using RNA isolated from diseased breast tissue removed from a |
| | | | 55-year-old Caucasian female during a unilateral extended simple mastectomy. |
| | | | Pathology indicated proliferative fibrocysytic changes characterized by apocrine |
| | | | metaplasia, sclerosing adenosis, cyst formation, and ductal hyperplasia without |
| | | | atypia. Pathology for the associated tumor tissue indicated an invasive grade 4 |
| | | | mammary adenocarcinoma. Patient history included atrial tachycardia and a benign |
| | | | neoplasm. Family history included cardiovascular and cerebrovascular disease. |
| 125 | 1234329 | LUNGFET03 | Library was constructed using RNA isolated from lung tissue removed from a Caucasian |
| | | | female fetus, who died at 20 weeks' gestation. |
| 126 | 1238747 | LUNGTUT02 | Library was constructed using RNA isolated from the metastatic lung tumor tissue of a |
| | | | 79-year-old Caucasian male. Pathology indicated a grade 4 carcinoma of the upper and |
| | | | lower left lobes. Patient history included a benign prostate neoplasm, |
| | | | atherosclerosis, and tobacco use. |
| 127 | 1265980 | BRAINOT09 | Library was constructed using RNA isolated from brain tissue removed from a Caucasian |
| | | | male fetus, who died at 23 weeks' gestation. |
| 128 | 1297333 | BRSTNOT07 | Library was constructed using RNA isolated from diseased breast tissue removed from a |
| | | | 43-year-old Caucasian female during a unilateral extended simple mastectomy. |
| | | | Pathology indicated mildly proliferative fibrocystic changes with epithelial |
| | | | hyperplasia, papillomatosis, and duct ectasia. Pathology for the associated tumor |
| | | | tissue indicated invasive grade 4, nuclear grade 3 mammary adenocarcinoma with |
| | | | extensive comedo necrosis. Family history included epilepsy, cardiovascular disease, |
| | | | and type II diabetes. |
| 129 | 1312824 | BLADTUT02 | Library was constructed using RNA isolated from bladder tumor tissue removed from an |
| | | | 80-year-old Caucasian female during a radical cystectomy and lymph node excision. |
| | | | Pathology indicated grade 3 invasive transitional cell carcinoma. Family history |
| | | | included acute renal failure, osteoarthritis, and atherosclerosis. |
| 130 | 1359294 | LUNGNOT12 | Library was constructed using RNA isolated from lung tissue removed from a 78-year-old |
| | | | Caucasian male during a segmental lung resection and regional lymph node resection. |
| | | | Pathology indicated fibrosis pleura was puckered, but not invaded. Pathology for the |
| | | | associated tumor tissue indicated an invasive pulmonary grade 3 adenocarcinoma. |
| | | | Patient history included cerebrovascular disease, arteriosclerotic coronary artery |
| | | | disease, thrombophlebitis, chronic obstructive pulmonary disease, and asthma. Family |
| | | | history included intracranial hematoma, cerebrovascular disease, arteriosclerotic |
| | | | coronary artery disease, and type I diabetes. |
| 131 | 1377380 | LUNGNOT10 | Library was constructed using RNA isolated from the lung tissue of a Caucasian male |
| | | | fetus, who died at 23 weeks' gestation. |
| 132 | 1383473 | BRAITUT08 | Library was constructed using RNA isolated from brain tumor tissue removed from the |
| | | | left frontal lobe of a 47-year-old Caucasian male during excision of cerebral |
| | | | meningeal tissue. Pathology indicated grade 4 fibrillary astrocytoma with focal |
| | | | tumoral radionecrosis. Patient history included cerebrovascular disease, deficiency |
| | | | anemia, hyperlipidemia, epilepsy, and tobacco use. Family history included |
| | | | cerebrovascular disease and a malignant prostate neoplasm. |
| 133 | 1388860 | EOSINOT01 | Library was constructed using RNA isolated from microscopically normal eosinophils |
| | | | from 31 non-allergic donors. |
| 134 | 1395322 | THYRNOT03 | Library was constructed using RNA isolated from thyroid tissue removed from the left |
| | | | thyroid of a 28-year-old Caucasian female during a complete thyroidectomy. Pathology |
| | | | indicated a small nodule of adenomatous hyperplasia present in the left thyroid. |
| | | | Pathology for the associated tumor tissue indicated dominant follicular adenoma, |
| | | | forming a well-encapsulated mass in the left thyroid. |
| 135 | 1419370 | KIDNNOT09 | Library was constructed using RNA isolated from the kidney tissue of a Caucasian male |
| | | | fetus, who died at 23 weeks' gestation. |
| 136 | 1429773 | SINTBST01 | Library was constructed using RNA isolated from ileum tissue obtained from an 18-year- |
| | | | old Caucasian female during bowel anastomosis. Pathology indicated Crohn's disease of |
| | | | the ileum, involving 15 cm of the small bowel. Family history included |
| | | | cerebrovascular disease and atherosclerotic coronary artery disease. |
| 137 | 1470820 | PANCTUT02 | Library was constructed using RNA isolated from pancreatic tumor tissue removed from a |
| | | | 45-year-old Caucasian female during radical pancreaticoduodenectomy. Pathology |
| | | | indicated a grade 4 anaplastic carcinoma. Family history included benign hypertension, |
| | | | hyperlipidemia and atherosclerotic coronary artery disease. |
| 138 | 1483455 | CORPNOT02 | Library was constructed using RNA isolated from diseased corpus callosum tissue |
| | | | removed from the brain of a 74-year-old Caucasian male who died from Alzheimer's |
| | | | disease. |
| 139 | 1527064 | UCMCL5T01 | Library was constructed using RNA isolated from mononuclear cells obtained from the |
| | | | umbilical cord blood of 12 individuals. The cells were cultured for 12 days with IL-5 |
| | | | before RNA was obtained from the pooled lysates. |
| 140 | 1557491 | BLADTUT04 | Library was constructed using RNA isolated from bladder tumor tissue removed from a |
| | | | 60-year-old Caucasian male during a radical cystectomy, prostatectomy, and vasectomy. |
| | | | Pathology indicated grade 3 transitional cell carcinoma in the left bladder wall. |
| | | | Carcinoma in-situ was identified in the dome and trigone. Patient history included |
| | | | tobacco use. Family history included type I diabetes, malignant neoplasm of the |
| | | | stomach, atherosclerotic coronary artery disease, and acute myocardial infarction. |
| 141 | 1576862 | LNODNOT03 | Library was constructed using RNA isolated from lymph node tissue obtained from a 67- |
| | | | year-old Caucasian male during a segmental lung resection and bronchoscopy. This |
| | | | tissue was extensively necrotic with 10% viable tumor. Pathology for the associated |
| | | | tumor tissue indicated invasive grade 3-4 squamous cell carcinoma. Patient history |
| | | | included hemangioma. Family history included atherosclerotic coronary artery disease, |
| | | | benign hypertension, and congestive heart failure. |
| 142 | 1609731 | COLNTUT06 | Library was constructed using RNA isolated from colon tumor tissue obtained from a 45- |
| | | | year-old Caucasian female during a total colectomy and total abdominal hysterectomy. |
| | | | Pathology indicated invasive grade 2 colonic adenocarcinoma forming a cecal mass. |
| | | | Patient history included benign neoplasms of the rectum and anus, multiple sclerosis |
| | | | and mitral valve disorder. Previous surgeries included a polypectomy. Family history |
| | | | included type I diabetes, cerebrovascular disease, malignant skin neoplasm, |
| | | | hypertension, atherosclerotic coronary artery disease and malignant neoplasm of the |
| | | | colon. |
| 143 | 1674538 | BLADNOT05 | Library was constructed using RNA isolated from bladder tissue removed from a 60-year- |
| | | | old Caucasian male during a radical cystectomy, prostatectomy, and vasectomy. |
| | | | Pathology for the associated tumor tissue indicated grade 3 transitional cell |
| | | | carcinoma. Carcinoma in-situ was identified in the dome and trigone. Patient history |
| | | | included tobacco use. |
| 144 | 1675287 | BLADNOT05 | Library was constructed using RNA isolated from bladder tissue removed from a 60-year- |
| | | | old Caucasian male during a radical cystectomy, prostatectomy, and vasectomy. |
| | | | Pathology for the associated tumor tissue indicated grade 3 transitional cell |
| | | | carcinoma. Carcinoma in-situ was identified in the dome and trigone. Patient history |
| | | | included tobacco use. |
| 145 | 1693903 | COLNNOT23 | Library was constructed using RNA isolated from diseased colon tissue removed from a |
| | | | 16-year-old Caucasian male during a total colectomy with abdominal/perineal resection. |
| | | | Pathology indicated gastritis and pancolonitis consistent with the acute phase of |
| | | | ulcerative colitis. Inflammation was more severe in the transverse colon, with |
| | | | inflammation confined to the mucosa. There was only mild involvement of the ascending |
| | | | and sigmoid colon. Family history included irritable bowel syndrome. |
| 146 | 1702962 | DUODNOT02 | Library was constructed using RNA isolated from duodenal tissue of an 8-year-old |
| | | | Caucasian female, who died from head trauma. Serology was positive for cytomegalovirus |
| | | | (CMV). |
| 147 | 1712916 | PROSNOT16 | Library was constructed using RNA isolated from diseased prostate tissue removed from |
| | | | a 68-year-old Caucasian male during a radical prostatectomy. Pathology indicated |
| | | | adenofibromatous hyperplasia. Pathology for the associated tumor tissue indicated an |
| | | | adenocarcinoma (Gleason grade 3 + 4). The patient presented with elevated prostate |
| | | | specific antigen (PSA). During this hospitalization, the patient was diagnosed with |
| | | | myasthenia gravis. Patient history included osteoarthritis, and type II diabetes. |
| | | | Family history included benign hypertension, acute myocardial infarction, |
| | | | hyperlipidemia, and arteriosclerotic coronary artery disease. |
| 148 | 1748313 | STOMTUT02 | Library was constructed using RNA isolated from stomach tumor tissue obtained from a |
| | | | 68-year-old Caucasian female during a partial gastrectomy. Pathology indicated a |
| | | | malignant lymphoma of diffuse large-cell type. Previous surgeries included |
| | | | cholecystectomy. Patient history included thalassemia. Family history included acute |
| | | | leukemia, malignant esophagus and stomach neoplasms, and atherosclerotic coronary |
| | | | artery disease. |
| 149 | 1754833 | LIVRTUT01 | Library was constructed using RNA isolated from liver tumor tissue removed from a 51- |
| | | | year-old Caucasian female during a hepatic lobectomy. Pathology indicated metastatic |
| | | | grade 3 adenocarcinoma consistent with colon cancer. Family history included a |
| | | | malignant neoplasm of the liver. |
| 150 | 1798701 | COLNNOT27 | Library was constructed using RNA isolated from diseased cecal tissue removed from a |
| | | | 31-year-old Caucasian male during a total intra-abdominal colectomy, appendectomy, and |
| | | | permanent ileostomy. Pathology indicated severe active Crohn's disease involving the |
| | | | colon from the cecum to the rectum. There were deep rake-like ulcerations that spared |
| | | | the intervening mucosa. The ulcers extended into the muscularis, and there was |
| | | | transmural inflammation. Patient history included an irritable colon. Previous |
| | | | surgeries included a colonscopy. |
| 151 | 1842496 | COLNNOT07 | Library was constructed using RNA isolated from colon tissue removed from a 60-year- |
| | | | old Caucasian male during a left hemicolectomy. |
| 152 | 1868613 | SKINBIT01 | Library was constructed using RNA isolated from diseased skin tissue of the left lower |
| | | | leg. Patient history included erythema nodosum of the left lower leg. |
| 153 | 1870609 | SKINBIT01 | Library was constructed using RNA isolated from diseased skin tissue of the left lower |
| | | | leg. Patient history included erythema nodosum of the left lower leg. |
| 154 | 1871961 | LEUKNOT02 | Library was constructed using RNA isolated from white blood cells of a 45-year-old |
| | | | female with blood type O+. The donor tested positive for cytomegalovirus (CMV). |
| 155 | 1876258 | LEUKNOT02 | Library was constructed using RNA isolated from white blood cells of a 45-year-old |
| | | | female with blood type O+. The donor tested positive for cytomegalovirus (CMV). |
| 156 | 1929822 | COLNTUT03 | Library was constructed using RNA isolated from colon tumor tissue obtained from the |
| | | | sigmoid colon of a 62-year-old Caucasian male during a sigmoidectomy and permanent |
| | | | colostomy. Pathology indicated invasive grade 2 adenocarcinoma. One lymph node |
| | | | contained metastasis with extranodal extension. Patient history included |
| | | | hyperlipidemia, cataract disorder, and dermatitis. Family history included benign |
| | | | hypertension, atherosclerotic coronary artery disease, hyperlipidemia, breast cancer |
| | | | and prostate cancer. |
| 157 | 1970095 | UCMCL5T01 | Library was constructed using RNA isolated from mononuclear cells obtained from the |
| | | | umbilical cord blood of 12 individuals. The cells were cultured for 12 days with IL-5 |
| | | | before RNA was obtained from the pooled lysates. |
| 158 | 1975473 | PANCTUT02 | Library was constructed using RNA isolated from pancreatic tumor tissue removed from a |
| | | | 45-year-old Caucasian female during radical pancreaticoduodenectomy. Pathology |
| | | | indicated a grade 4 anaplastic carcinoma. Family history included benign hypertension, |
| | | | hyperlipidemia and atherosclerotic coronary artery disease. |
| 159 | 1976527 | PANCTUT02 | Library was constructed using RNA isolated from pancreatic tumor tissue removed from a |
| | | | 45-year-old Caucasian female during radical pancreaticoduodenectomy. Pathology |
| | | | indicated a grade 4 anaplastic carcinoma. Family history included benign hypertension, |
| | | | hyperlipidemia and atherosclerotic coronary artery disease. |
| 160 | 2108023 | BRAITUT03 | Library was constructed using RNA isolated from brain tumor tissue removed from the |
| | | | left frontal lobe a 17-year-old Caucasian female during excision of a cerebral |
| | | | meningeal lesion. Pathology indicated a grade 4 fibrillary giant and small-cell |
| | | | astrocytoma. Family history included benign hypertension and cerebrovascular disease. |
| 161 | 2135746 | ENDCNOT01 | Library was constructed using RNA isolated from endothelial cells removed from the |
| | | | coronary artery of a 58-year-old Hispanic male. |
| 162 | 2154810 | BRAINOT09 | Library was constructed using RNA isolated from brain tissue removed from a Caucasian |
| | | | male fetus, who died at 23 weeks' gestation. |
| 163 | 2228991 | PROSNOT16 | Library was constructed using RNA isolated from diseased prostate tissue removed from |
| | | | a 68-year-old Caucasian male during a radical prostatectomy. Pathology indicated |
| | | | adenofibromatous hyperplasia. Pathology for the associated tumor tissue indicated an |
| | | | adenocarcinoma (Gleason grade 3 + 4). The patient presented with elevated prostate |
| | | | specific antigen (PSA). During this hospitalization, the patient was diagnosed with |
| | | | myasthenia gravis. Patient history included osteoarthritis, and type II diabetes. |
| | | | Family history included benign hypertension, acute myocardial infarction, |
| | | | hyperlipidemia, and arteriosclerotic coronary artery disease. |
| 164 | 2241206 | PANCTUT02 | Library was constructed using RNA isolated from pancreatic tumor tissue removed from a |
| | | | 45-year-old Caucasian female during radical pancreaticoduodenectomy. Pathology |
| | | | indicated a grade 4 anaplastic carcinoma. Family history included benign hypertension, |
| | | | hyperlipidemia and atherosclerotic coronary artery disease. |
| 165 | 2259590 | OVARTUT01 | Library was constructed using RNA isolated from ovarian tumor tissue removed from a |
| | | | 43-year-old Caucasian female during removal of the fallopian tubes and ovaries. |
| | | | Pathology indicated grade 2 mucinous cystadenocarcinoma involving the entire left |
| | | | ovary. Patient history included mitral valve disorder, pneumonia, and viral |
| | | | hepatitis. Family history included atherosclerotic coronary artery disease, |
| | | | pancreatic cancer, stress reaction, cerebrovascular disease, breast cancer, and |
| | | | uterine cancer. |
| 166 | 2307537 | NGANNOT01 | Library was constructed using RNA isolated from tumorous neuroganglion tissue removed |
| | | | from a 9-year-old Caucasian male during a soft tissue excision of the chest wall. |
| | | | Pathology indicated a ganglioneuroma. Family history included asthma. |
| 167 | 2440675 | EOSITXT01 | Library was constructed using RNA isolated from eosinophils stimulated with IL-5. |
| 168 | 2463542 | THYRNOT03 | Library was constructed isolated from the diseased left thyroid tissue removed from a |
| | | | 13-year-old Caucasian female during a complete thyroidectomy. Pathology indicated |
| | | | lymphocytic thyroiditis. |
| 169 | 2486031 | CONUTUT01 | Library was constructed using RNA isolated from sigmoid mesentery tumor tissue |
| | | | obtained from a 61-year-old female during a total abdominal hysterectomy and bilateral |
| | | | salpingo-oophorectomy with regional lymph node excision. Pathology indicated a |
| | | | metastatic grade 4 malignant mixed mullerian tumor present in the sigmoid mesentery at |
| | | | two sites. |
| 170 | 2493052 | ADRETUT05 | Library was constructed using RNA isolated from adrenal tumor tissue removed from a |
| | | | 52-year-old Caucasian female during a unilateral adrenalectomy. Pathology indicated a |
| | | | pheochromocytoma. |
| 171 | 2512074 | CONUTUT01 | Library was constructed using RNA isolated from sigmoid mesentery tumor tissue |
| | | | obtained from a 61-year-old female during a total abdominal hysterectomy and bilateral |
| | | | salpingo-oophorectomy with regional lymph node excision. Pathology indicated a |
| | | | metastatic grade 4 malignant mixed mullerian tumor present in the sigmoid mesentery at |
| | | | two sites. |
| 172 | 2646274 | LUNGTUT11 | Library was constructed using RNA isolated from lung tumor tissue removed from the |
| | | | right lower lobe of a 57-year-old Caucasian male during a segmental lung resection. |
| | | | Pathology indicated an infiltrating grade 4 squamous cell carcinoma. Multiple |
| | | | intrapulmonary peribronchial lymph nodes showed metastatic squamous cell carcinoma. |
| | | | Patient history included a benign brain neoplasm and tobacco abuse. Family history |
| | | | included spinal cord cancer, type II diabetes, cerebrovascular disease, and malignant |
| | | | prostate neoplasm. |
| 173 | 2672566 | KIDNNOT19 | Library was constructed using RNA isolated from kidney tissue removed a 65-year-old |
| | | | Caucasian male during an exploratory laparotomy and nephroureterectomy. Patient |
| | | | history included malignant melanoma of the abdominal skin, benign neoplasm of colon, |
| | | | cerebrovascular disease, and umbilical hernia. Family history included |
| | | | cerebrovascular disease, prostate cancer, myocardial infarction, and atherosclerotic |
| | | | coronary artery disease. |
| 174 | 2689674 | LUNGNOT23 | Library was constructed using RNA isolated from left lobe lung tissue removed from a |
| | | | 58-year-old Caucasian male. Patient history included soft tissue cancer, secondary |
| | | | cancer of the lung, prostate cancer, and an acute duodenal ulcer with hemorrhage. |
| | | | Family history included prostate cancer, breast cancer, and acute leukemia. |
| 175 | 2703282 | OVARTUT10 | Library was constructed using RNA isolated from ovarian tumor tissue removed from the |
| | | | left ovary of a 58-year-old Caucasian female during a total abdominal hysterectomy, |
| | | | removal of a solitary ovary, and repair of inguinal hernia. Pathology indicated a |
| | | | metastatic grade 3 adenocarcinoma of colonic origin, forming a partially cystic and |
| | | | necrotic tumor mass in the left ovary, and an adenocarcinoma of colonic origin, |
| | | | forming a nodule in the left mesovarium. A single intramural leiomyoma was identified |
| | | | in the myometrium. The cervix showed mild chronic cystic cervicitis. Patient history |
| | | | included benign hypertension, follicular cyst of the ovary, colon cancer, benign colon |
| | | | neoplasm, and osteoarthritis. Family history included emphysema, myocardial |
| | | | infarction, atherosclerotic coronary artery disease, benign hypertension, and |
| | | | hyperlipidemia. |
| 176 | 2738293 | OVARNOT09 | Library was constructed using RNA isolated from ovarian tissue removed from a 28-year- |
| | | | old Caucasian female during a vaginal hysterectomy and removal of the fallopian tubes |
| | | | and ovaries. Pathology indicated multiple follicular cysts ranging in size from 0.4 |
| | | | to 1.5 cm in the right and left ovaries, chronic cervicitis and squamous metaplasia of |
| | | | the cervix, and endometrium in weakly proliferative phase. Family history included |
| | | | benign hypertension, hyperlipidemia, and atherosclerotic coronary artery disease. |
| 177 | 2772776 | PANCNOT15 | Library was constructed using RNA isolated from diseased pancreatic tissue removed |
| | | | from a 15-year-old Caucasian male during an exploratory laparotomy with distal |
| | | | pancreatectomy and total splenectomy. Pathology indicated islet cell hyperplasia. |
| | | | Family history included prostate cancer and cardiovacular disease. |
| 178 | 2774476 | PANCNOT15 | Library was constructed using RNA isolated from diseased pancreatic tissue removed |
| | | | from a 15-year-old Caucasian male during an exploratory laparotomy with distal |
| | | | pancreatectomy and total splenectomy. Pathology indicated islet cell hyperplasia. |
| | | | Family history included prostate cancer and cardiovacular disease. |
| 179 | 2804624 | BLADTUT08 | Library was constructed using RNA isolated from bladder tumor tissue removed from a |
| | | | 72-year-old Caucasian male during a radical cystectomy and prostatectomy. Pathology |
| | | | indicated an invasive grade 3 (of 3) transitional cell carcinoma in the right bladder |
| | | | base. Patient history included pure hypercholesterolemia and tobacco abuse. Family |
| | | | history included cerebrovascular disease, brain cancer, and myocardial infarction. |
| 180 | 2848225 | BRSTTUT13 | Library was constructed using RNA isolated from breast tumor tissue removed from the |
| | | | right breast of a 46-year-old Caucasian female during a unilateral extended simple |
| | | | mastectomy with breast reconstruction. Pathology indicated an invasive grade 3 |
| | | | adenocarcinoma, ductal type with apocrine features and greater than 50% intraductal |
| | | | component. Patient history included breast cancer. |
| 181 | 2882241 | UTRSTUT05 | Library was constructed using RNA isolated from uterine tumor tissue removed from a |
| | | | 41-year-old Caucasian female during a vaginal hysterectomy with dilation and |
| | | | curettage. Pathology indicated uterine leiomyoma. The endometrium was secretory and |
| | | | contained fragments of endometrial polyps. Benign endo- and ectocervical mucosa were |
| | | | identified in the endocervix. Patient history included a ventral hernia and a benign |
| | | | ovarian neoplasm. |
| 182 | 2939011 | THYMFET02 | Library was constructed using RNA isolated from thymus tissue removed from a Caucasian |
| | | | female fetus, who died at 17 weeks' gestation from anencephalus. |
| 183 | 2947188 | BRAITUT23 | Library was constructed using RNA isolated from left posterior brain tumor tissue |
| | | | removed from a 36-year-old male during a cerebral meninges lesion excision. Pathology |
| | | | indicated meningioma. Family history included malignant skin melanoma, |
| | | | atherosclerotic coronary artery disease, repair of unspecified vessel, hyperlipidemia, |
| | | | Huntington's chorea, and rheumatoid arthritis. |
| 184 | 3094001 | BRSTNOT19 | Library was constructed using RNA isolated from breast tissue removed from a 67-year- |
| | | | old Caucasian female during a unilateral extended simple mastectomy. Patient history |
| | | | included depressive disorder and benign large bowel neoplasm. Family history included |
| | | | cerebrovascular disease, benign hypertension, congestive heart failure, and lung |
| | | | cancer. |
| 185 | 3110061 | BRSTNOT19 | Library was constructed using RNA isolated from breast tissue removed from a 67-year- |
| | | | old Caucasian female during a unilateral extended simple mastectomy. Patient history |
| | | | included depressive disorder, benign large bowel neoplasm, and hemorrhoids. Family |
| | | | history included cerebrovascular and cardiovascular disease and lung cancer. |
| 186 | 3146614 | BRSTTUT15 | Library was constructed using RNA isolated from breast tumor tissue removed from a 46- |
| | | | year-old Caucasian female during a unilateral extended simple mastectomy. Pathology |
| | | | indicated invasive grade 3, nuclear grade 2 adenocarcinoma, ductal type. An |
| | | | intraductal carcinoma component, non-comedo, comprised approximately 50% of the |
| | | | neoplasm, including the lactiferous ducts. Angiolymphatic involvement was present. |
| | | | Metastatic adenocarcinoma was present in 7 of 10 axillary lymph nodes. The largest |
| | | | nodal metastasis measured 3 cm, and focal extracapsular extension was identified. |
| | | | Family history included atherosclerotic coronary artery disease, type II diabetes, |
| | | | cerebrovascular disease, and depression. |
| 187 | 3295381 | PENCNOT06 | Library was constructed using RNA isolated from penis corpora cavernosa tissue removed |
| | | | from a 3-year-old Black male. |
| 188 | 3364774 | TLYJINT01 | Library was constructed using RNA isolated from a Jurkat cell line derived from the T |
| | | | cells of a male. The cells were treated for 18 hours with 50 ng/ml. phorbol ester (PMA) |
| | | | and 1 micromolar calcium ionophore. Patient history included acute T-cell leukemia. |
| 189 | 3397777 | PROSBPT02 | Library was constructed using RNA isolated from diseased prostate tissue removed from |
| | | | a 65-year-old Caucasian male during a radical prostatectomy. Pathology indicated |
| | | | benign prostatic hyperplasia (BPH). One (of 7) right pelvic lymph nodes was positive |
| | | | for metastatic adenocarcinoma. The patient presented with induration and elevated |
| | | | prostate specific antigen (PSA). Patient history included a benign neoplasm of the |
| | | | large bowel and benign hypertension. |
| 190 | 3403046 | ESOGNOT03 | Library was constructed using RNA isolated from esophageal tissue obtained from a 53- |
| | | | year-old Caucasian male during a partial esophagectomy, proximal gastrectomy, and |
| | | | regional lymph node biopsy. Patient history included membranous nephritis, |
| | | | hyperlipidemia, benign hypertension, and anxiety state. Previous surgeries included |
| | | | an adenotonsillectomy. Family history included cirrhosis, abdominal aortic aneurysm |
| | | | rupture, breast cancer, myocardial infarction, and atherosclerotic coronary artery |
| | | | disease. |
| 191 | 3538506 | SEMVNOT04 | Library was constructed using RNA isolated from seminal vesicle tissue removed from a |
| | | | 61-year-old Caucasian male during a radical prostatectomy. Pathology for the |
| | | | associated tumor tissue indicated adenocarcinoma, Gleason grade 3 + 3. The patient |
| | | | presented with induration, hyperplasia of the prostate, and elevated prostate specific |
| | | | antigen. Patient history included renal failure, osteoarthritis, left renal artery |
| | | | stenosis, thrombocytopenia, hyperlipidemia, and hepatitis C (carrier). Family history |
| | | | included benign hypertension. |
| 192 | 3575519 | BRONNOT01 | Library was constructed using RNA isolated from bronchial tissue removed from a 15- |
| | | | year-old Caucasian male. |
| 193 | 3598694 | FIBPNOT01 | Library was constructed using RNA isolated from fibroblasts of the prostate stroma |
| | | | removed from a male fetus, who died after 26 weeks' gestation. |
| 194 | 3638819 | LUNGNOT30 | Library was constructed using RNA isolated from lung tissue removed from a Caucasian |
| | | | male fetus, who died from Patau's syndrome (trisomy 13) at 20-weeks' gestation. |
| 195 | 3717139 | PENCNOT10 | Library was constructed using RNA isolated from penis left corpora cavernosa tissue |
| | | | removed from a male. |
| 196 | 3892962 | BRSTTUT16 | Library was constructed using RNA isolated from breast tumor tissue removed from a 43- |
| | | | year-old Caucasian female during a unilateral extended simple mastectomy. Pathology |
| | | | indicated recurrent grade 4, nuclear grade 3, ductal carcinoma. Angiolymphatic space |
| | | | invasion was identified. Left breast needle biopsy indicated grade 4 ductal |
| | | | adenocarcinoma. Paraffin embedded tissue was estrogen positive. Patient history |
| | | | included breast cancer and deficiency anemia. Family history included cervical |
| | | | cancer. |
| 197 | 4153521 | MUSLTMT01 | Library was constructed using RNA isolated from glossal muscle tissue removed from a |
| | | | 41-year-old Caucasian female during partial glossectomy. Pathology for the matched |
| | | | tumor tissue indicated invasive grade 3, squamous cell carcinoma forming an ulcerated |
| | | | mass of the tongue. The tumor infiltrated superficially into muscle. One high lymph |
| | | | node contained a necrotizing granuloma. The patient presented with a complicated open |
| | | | wound of the tongue. Patient history included obesity, unspecified nasal and sinus |
| | | | disease, and normal delivery. Patient medications included Premarin, Hydrocodone, and |
| | | | Equate nasal spray. Family history included benign hypertension, atherosclerotic |
| | | | coronary artery disease, upper lobe lung cancer, type II diabetes, hyperlipidemia, and |
| | | | cirrhosis of the liver. |
| 198 | 4585038 | OVARNOT13 | Library was constructed using RNA isolated from left ovary tissue removed from a 47- |
| | | | year-old Caucasian female during a vaginal hysterectomy with bilateral salpingo- |
| | | | oophorectomy, and dilation and curettage. Pathology for the associated tumor tissue |
| | | | indicated a single intramural leiomyoma. The endometrium was in the secretory phase. |
| | | | The patient presented with metrorrhagia. Patient history included hyperlipidemia and |
| | | | benign hypertension. Family history included colon cancer, benign hypertension, |
| | | | atherosclerotic coronary artery disease, and breast cancer. |
| 199 | 4674640 | NOSEDIT02 | Library was constructed using RNA isolated from nasal polyp tissue. |
| 200 | 4676066 | NOSEDIT02 | Library was constructed using RNA isolated from nasal polyp tissue. |
| 201 | 4830687 | BRAVTXT03 | Library was constructed using RNA isolated from treated astrocytes removed from the |
| | | | brain of a female fetus who died after 22 weeks' gestation. The cells were treated |
| | | | with tumor necrosis factor-alpha (TNF) and interleukin 1 (IL-1), 10 ng/ml each for 24 |
| | | | hours. |
| 202 | 4880891 | UTRMTMT01 | Library was constructed using RNA isolated from myometrial tissue removed from a 45- |
| | | | year-old Caucasian female during vaginal hysterectomy and bilateral salpingo- |
| | | | oophorectomy. Pathology for the matched tumor tissue indicated multiple (23) |
| | | | subserosal, intramural, and submucosal leiomyomata. The endometrium was in |
| | | | proliferative phase. The right ovary contained an old corpus luteum. The patient |
| | | | presented with stress incontinence. Patient history included normal delivery. Patient |
| | | | medications included Motrin, iron sulfate, Premarin, prednisone, Tylenol #3, and |
| | | | Colace. Family history included cerebrovascular disease, depression, and |
| | | | atherosclerotic coronary artery disease. |
| 203 | 4909754 | THYMDIT01 | Library was constructed using RNA isolated from diseased thymus tissue removed from a |
| | | | 16-year-old Caucasian female during a total excision of thymus and regional lymph node |
| | | | excision. Pathology indicated thymic follicular hyperplasia. The right lateral thymus |
| | | | showed reactive lymph nodes. A single reactive lymph node was also identified at the |
| | | | inferior thymus margin. The patient presented with myasthenia gravis, malaise, |
| | | | fatigue, dysphagia, severe muscle weakness, and prominent eyes. Patient history |
| | | | included frozen face muscles. Family history included depression, hepatitis B, |
| | | | myocardial infarction, atherosclerotic coronary artery disease, leukemia, multiple |
| | | | sclerosis, and lupus. |
| 204 | 4911931 | THYMDIT01 | Library was constructed using RNA isolated from diseased thymus tissue removed from a |
| | | | 16-year-old Caucasian female during a total excision of thymus and regional lymph node |
| | | | excision. Pathology indicated thymic follicular hyperplasia. The right lateral thymus |
| | | | showed reactive lymph nodes. A single reactive lymph node was also identified at the |
| | | | inferior thymus margin. The patient presented with myasthenia gravis, malaise, |
| | | | fatigue, dysphagia, severe muscle weakness, and prominent eyes. Patient history |
| | | | included frozen face muscles. Family history included depression, hepatitis B, |
| | | | myocardial infarction, atherosclerotic coronary artery disease, leukemia, multiple |
| | | | sclerosis, and lupus. |
| 205 | 4920433 | TESTNOT11 | Library was constructed using RNA isolated from testicular tissue removed from a 16- |
| | | | year-old Caucasian male who died from hanging. |
| 206 | 5042113 | COLHTUT01 | Library was constructed using RNA isolated from colon tumor tissue removed from the |
| | | | hepatic flexure of a 55-year-old Caucasian male during right hemicolectomy, incidental |
| | | | appendectomy, and permanent colostomy. Pathology indicated invasive grade 3 |
| | | | adenocarcinoma. Patient history included benign hypertension, anxiety, abnormal blood |
| | | | chemistry, blepharitis, heart block, osteoporosis, acne, and hyperplasia of prostate. |
| | | | Family history included prostate cancer, acute myocardial infarction, stroke, and |
| | | | atherosclerotic coronary artery disease. |
| 207 | 5083853 | LNOGTUT01 | Library was constructed using RNA isolated from gastric lymph node tumor tissue |
| | | | removed from a 61-year-old Caucasian male during proximal gastrectomy and partial |
| | | | esophagectomy. Pathology indicated invasive grade 3 adenocarcinoma forming an |
| | | | ulcerated, plaque-like mass situated at the lower esophagus just proximal to the |
| | | | gastroesophageal junction, with partial involvement of cardiac mucosa. Metastatic |
| | | | adenocarcinoma was identified in 2 of 3 paraesophageal and 9 of 14 paragastric lymph |
| | | | nodes with perinodal extension to form grossly matted nodes. The paraesophageal lymph |
| | | | node contained metastatic grade 3 adenocarcinoma with perinodal extension. Tissue from |
| | | | the mesentery showed dense fibrosis with chronic inflammation and focal calcification. |
| | | | Patient history included a benign colon neoplasm and hyperlipidemia. Family history |
| | | | included type II diabetes, accessory sinus cancer, atherosclerotic coronary artery |
| | | | disease, and acute myocardial infarction. |
| 208 | 5283981 | TESTNON04 | This normalized testis tissue library was constructed from 6.48 million independent |
| | | | clones from a pool of two testicular libraries. Starting RNA was made from testicular |
| | | | tissue removed from a 16-year-old Caucasian male who died from hanging. The library |
| | | | was normalized in two rounds using conditions adapted from Soares et al., PNAS (1994) |
| | | | 91: 9228 and Bonaldo et al. except that a significantly longer (48-hours/round) |
| | | | reannealing hybridization was used. |
| 209 | 5510549 | BRADDIR01 | Library was constructed using RNA isolated from diseased choroid plexus tissue of the |
| | | | lateral ventricle removed from the brain of a 57-year-old Caucasian male, who died |
| | | | from a cerebrovascular accident. Patient history included Huntington's disease and |
| | | | emphysema. |
| 210 | 5544862 | BRADDIR01 | Library was constructed using RNA isolated from diseased choroid plexus tissue of the |
| | | | lateral ventricle removed from the brain of a 57-year-old Caucasian male, who died |
| | | | from a cerebrovascular accident. Patient history included Huntington's disease and |
| | | | emphysema. |
| 211 | 5573394 | TLYMNOT08 | Library was constructed using RNA isolated from anergic allogenic T-lymphocyte tissue |
| | | | removed from an adult (40-50-year-old) Caucasian male. The cells were incubated for 3 |
| | | | days in the presence of OKT3 mAb (1 microgram/mlOKT3) and 5% human serum. |
| 212 | 5850840 | FIBAUNT02 | Library was constructed using RNA isolated from untreated aortic adventitial |
| | | | fibroblasts removed from a 65-year-old Caucasian female. |
| 213 | 5942936 | COLADIT05 | Library was constructed using RNA isolated from diseased ascending colon tissue |
| | | | removed from a 32-year-old Caucasian male during a total intra-abdominal colectomy, |
| | | | abdominal-perineal rectal resection, and temporary ileostomy. Pathology indicated |
| | | | chronic ulcerative colitis extending in a continuous fashion from the mid-portion of |
| | | | the ascending colon to the rectum. This was characterized by crypt abscess formation |
| | | | and inflammation confined to the mucosa and submucosa. The terminal ileum exhibited |
| | | | ileitis and the rectal mucosa showed crypt abscess formation. The patient presented |
| | | | with ulcerative colitis and blood in the stools. Patient history included tobacco use. |
| | | | Patient medications included Imuran, prednisone, sulfasalazine, and azathioprine. |
| | | | Family history included ulcerative colitis, malignant breast neoplasm and acute |
| | | | myocardial infarction. |
| 214 | 5951431 | LIVRTUN04 | This normalized library was constructed from 1.72 million independent clones from an |
| | | | untreated C3A liver tumor library. C3A is a derivative of Hep G2, a cell line derived |
| | | | from a hepatoblastoma removed from a 15-year-old Caucasian male. The library was |
| | | | normalized in two rounds using conditions adapted from Soares et al., PNAS (1994) |
| | | | 91: 9228-9232 and Bonaldo et al., Genome Research 6 (1996): 791, except that a |
| | | | significantly longer (48 hours/round) reannealing hybridization was used. |

[0357] TABLE 5

| Program | Description | Reference | Parameter Threshold |
|---|---|---|---|
| ABI | A program that removes vector sequences and | Applied Biosystems, Foster City, CA. | |
| FACT- | masks ambiguous bases in nucleic acid sequences. | | |
| URA | | | |
| ABI/ | A Fast Data Finder useful in comparing and | Applied Biosystems, Foster City, CA; | Mismatch < 50% |
| PARA- | | | |
| CEL | | | |
| FDF | | | |
| | annotating amino acid or nucleic acid sequences. | Paracel Inc., Pasadena, CA. | |
| ABI Auto- | A program that assembles nucleic acid sequences. | Applied Biosystems, Foster City, CA. | |
| Assembler | | | |
| BLAST | A Basic Local Alignment Search Tool useful in | Altschul, S.F. et al. (1990) J. Mol. Biol. | ESTs: Probability value = 1.0E−8 |
| | sequence similarity search for amino acid and | 215:403410; Altschul, S.F. et al. (1997) | or less |
| | nucleic acid sequences. BLAST includes five | Nucleic Acids Res. 25:3389-3402. | Full Length |
| | sequences: Probability | | |
| | functions: blastp, blastn, blastx, tblastn, and tblastx. | | value = 1.0E−10 or less |
| FASTA | A Pearson and Lipruan algorithm that searches for | Pearson, W.R. and D.J. Lipruan (1988) Proc. | ESTs: fasta E value = 1.06E−6 |
| | similarity between a query sequence and a group of | Natl. Acad Sci. USA 85:2444-2448; Pearson, | Assembled ESTs: fasta |
| | sequences of the same type. FASTA comprises as | W.R. (1990) Methods Enzymol. 183:63-98; | Identity= 95% or greater and |
| | least five functions: fasta, tfasta, fastx, tfastx, and | and Smith, T.F. and M.S. Waterman (1981) | Match length = 200 bases or |
| | ssearch. | Adv. Appl. Math. 2:482-489. | greater; fastx E value = 1.0E−8 or |
| | | | less Full Length sequences: |
| | | | fastx score = 100 or greater |
| BLIMPS | A BLocks IMProved Searcher that matches a | Henikoff, S. and J.G. Henikoff (1991) Nucleic | Score = 1000 or greater; |
| | sequence against those in BLOCKS, PRINTS, | Acids Res. 19:6565-6572; Henikoff, J.G. and | Ratio of Score/Strength = 0.75 or |
| | DOMO, PRODOM, and PEAM databases to search | S. Henikoff (1996) Methods Enzymol. | larger; and, if applicable, |
| | for gene families, sequence homology, and structural | 266:88-105; and Attwood, T.K. et al. (1997) J. | Probability value = 1.0E−3 or less |
| | fingerprint regions. | Chem. Inf. Comput. Sci. 37:417-424. | |
| HMMER | An algorithm for searching a query sequence against | Krogh, A. et al. (1994) J. Mol. Biol. | Score = 10-50 bits for PFAM hits, |
| | hidden Markov model (HMM)-based databases of | 235:1501-1531; Sonnhammer, E.L.L. et al. | depending on individual protein |
| | protein family consensus sequences, such as PFAM. | (1988) Nucleic Acids Res. 26:320-322; | families |
| | | Durbin, R. et al. (1998) Our World View, in a | |
| | | Nutshell, Cambridge Univ. Press, pp. 1-350. | |
| Profile- | An algorithm that searches for structural and sequence | Gribskov, M. et al. (1988) CABIOS 4:61-66; | Normalized quality score ≦ GCG- |
| Scan | motifs in protein sequences that match | Gribskov, M. et al. (1989) Methods Enzymol. | specified “HIGH” value for that |
| | sequence patterns defined in Prosite. | 183:146-159; Bairoch, A. et al. (1997) | particular Prosite motif. |
| | | Nucleic Acids Res. 25:217-221. | Generally, score = 1.4-2.1. |
| Phred | A base-calling algorithm that examines automated | Ewing, B. et al. (1998) Genome Res. | |
| | sequencer traces with high sensitivity and probability. | 8:175-185; Ewing, B. and P. Green | |
| | | (1998) GenomeRes. 8:186-194. | |
| Phrap | A Phils Revised Assembly Program including | Smith, T.F. and M.S. Waterman (1981) Adv. | Score = 120 or greater; |
| | SWAT and CrossMatch, programs based on efficient | Appl. Math. 2:482-489; Smith, T.F. and M.S. | Match length = 56 or greater |
| | implementation of the Smith-Waterman algorithm, | Waterman (1981) J. Mol. Biol. 147:195-197; | |
| | useful in searching sequence homology and | and Green, P., University of Washington, | |
| | assembling DNA sequences | Seattle, WA. | |
| Consed | A graphical tool for viewing and | Gordon, D. et al. (1998) | |
| | editing Phrap assemblies. | Genome Res. 8:195-202. | |
| SPScan | A weight matrix analysis program that scans protein | Nielson, H. et al. (1997) Protein Engineering | Score = 3.5 or greater |
| | sequences for the presence of secretory signal peptides. | 10:1-6; Claverie, J.M. and S. Audic (1997) | |
| | | CABIOS 12:431-439. | |
| Motifs | A program that searches amino acid sequences for | Bairoch, A. et al. (1997) Nucleic | |
| | patterns that matched those defined in Prosite. | Acids Res. 25:217-221; | |
| | | Wisconsin Package Program Manual, | |
| | | version 9, page M51-59, | |
| | | Genetics Computer Group, Madison, WI. | |

The application's sequence listing, which the Patent Office published only in electronic form, follows.

SEQUENCE LISTING (214 sequences)

SEQ ID NO: 1 - protein, 463 aa, Homo sapiens
  misc_feature: Incyte ID No: 095210CD1
MAQGLVTFADVAIDFSQEEWACLNSAQRDLYWDVMLENYSNLVSLDLESAYENKSLPTEKNIHEIRASKRNSDRRSKSLGRNWICEGTLERPQRSRGRYVNQMIINYVKRPATREGTPPRTHQRHHKENSFECKDCGKAFSRGYQLSQHQKIHTGEKPYECKECKKAFRWGNQLTQHQKIHTGEKPYECKDCGKAFRWGSSLVIHKRIHTGEKPYECKDCGKAFRRGDELTQHQRFHTGEKDYECKDCGKTFSRVYKLIQHKRIHSGEKPYECKDCGKAFICGSSLIQHKRIHTGEKPYECQECGKAFTRVNYLTQHQKIHTGEKPHECKECGKAFRWGSSLVKHERIHTGEKPYKCTECGKAFNCGYHLTQHERIHTGETPYKCKECGKAFIYGSSLVKHERIHTGVKPYGCTECGKSFSHGHQLTQHQKTHSGAKSYECKECGKACNHLNHLREHQRIHNS

SEQ ID NO: 2 - protein, 216 aa, Homo sapiens
  misc_feature: Incyte ID No: 157953CD1
MTERVDFTALLPLEPPLPPGTLPQPSPTPPDLEAMASLLKKELEQMEDFFLDAPLLPPPSPPPLPPPPLPPAPSLPLSLPSFDLPQPPVLDTLDLLAIYCRNEAGQEEVGMPPLPPPQQPPPPSPPQPSRLAPYPHPATTRGDRKQKKRDQNKSAALRYRQRKRAEGEALEGECQGLEARNRELKERAESVEREIQYVKDLLIEVYKARSQRTRSC

SEQ ID NO: 3 - protein, 284 aa, Homo sapiens
  misc_feature: Incyte ID No: 159196CD1
MGSEKEQSPEPHLPEEGEGGKPWRVDDSEGSWIPPGEKEHGQESLSDELQETHPKKPWQKVTVRARELGDPIAHPRHEADEKPFICAQCGKTFNNTSNLRTHQRIHTGEKPYKCSECGKSFSRSSNRIRHERIHLEEKHYKCPKCQESFRRRSDLTTHQQDHLGKRPYRCDICGKSFSQSATLAVHHRTHLEPAPYICCECGKSFSNSSSFGVHHRTHTGERPYECTECGRTFSDISNFGAHQRTHRGEKPYRCTVCGKHFSRSSNLIRHQKTHLGEQAGKDSS

SEQ ID NO: 4 - protein, 1416 aa, Homo sapiens
  misc_feature: Incyte ID No: 343338CD1
MATRPAGQNLQGIEDKITKMKVTMVAWDRHDNTVITAVNNMTLKVWNSYTGQLIHVLMGHEDEVFVLEPHPFDPRVLFSAGHDGNVIVWDLARGVKIRSYFNMIEGQGHGAVFDCKCSPDGQHFACTDSHGHLLIFGFGSSSKYDKIADQMFFHSDYRPLIRDANNFVLDEQTQQAPHLMPPPFLVDVDGNPHPSRYQRLVPGRENCREEQLIPQMGVTSSGLNQVLSQQANQEISPLDSMIQRLQQEQDLRRSGEAGISNTSRLSRGSISSTSEVHSPPNVGLRRSGQIEGVRQMHSNAPRSEIATERDLVAWSRRVVVPELSAGVASRQEEWRTAKGEEEIKTYRSEEKRKHLTVPKENKIPTVSKNHAHEHFLDLGESKKQQTNQHNYRTRSALEETPRPSEEIENGSSSSDEGEVVAVSGGTSEEEERAWHSDGSSSDYSSDYSDWTADAGINLQPPKKVPKNKTKKAESSSDEEEESEKQKQKQIKKEKKKVNEEKDGPISPKKKKPKERKQKRLAVGELTENGLTLEEWLPSTWITDTIPRRCPFVPQMGDEVYYFRQGHEAYVEMARKNKIYSINPKKQPWHKMELREQELMKIVGIKYEVGLPTLCCLKLAFLDPDTGKLTGGSFTMKYHDMPDVIDFLVLRQQFDDAKYRRWNIGDRFRSVIDDAWWFGTIESQEPLQLEYPDSLFQCYNVCWDNGDTEKVSPWDMELIPNNAVFPEELGTSVPLTDGECRSLIYKPLDGEWGTNPRDEECERIVAGINQLMTLDIASAFVAPVDLQAYPMYCTVVAYPTDLSTIKQRLENRFYRRVSSLMWEVRYIEHNTRTFNEPGSPIVKSAKFVTDLLLHFIKDQTCYNIIPLYNSMKKKVLSDSEDEEKDANVPGTSTRKRKDHQPRRRLRNRAQSYDIQAWKKQCEELLNLIFQCEDSEPFRQPVDLLEYPDYRDIIDTPMDFATVRETLEAGNYESPMELCKDVRLIFSNSKAYTPSKRSRIYSMSLRLSAFFEEHISSVLSDYKSALRFHKRNTITKRRKKRNRSSSVSSSAASSPERKKRILKPQLKSESSTSAFSTPTRSIPPRHNAAQINGKTESSSVVRTRSNRVVVDPVVTEQPSTSSAAKTFITKANASAIPGKTILENSVKHSKALNTLSSPGQSSFSHGTRNNSAKENMEKEKPVKRKMKSSVLPKASTLSKSSAVIEQGDCKNNALVPGTIQVNGHGGQPSKLVKRGPGRKPKVEVNTNSGEIIHKKRGRKPKKLQYAKPEDLEQNNVHPIRDEVLPSSTCNFLSETNNVKEDLLQKKNRGGRKPKRKMKTQKLDADLLVPASVKVLRRSNRKKIDDPIDEEEEFEELKGSEPHMRTRNQGRRTAFYNEDDSEEEQRQLLFEDTSLTFGTSSRGRVRKLTEKAKANLIGW

SEQ ID NO: 5 - protein, 426 aa, Homo sapiens
  misc_feature: Incyte ID No: 402386CD1
MDSVAFEDVAVNFTQEEWALLSPSQKNLYRDVTLETFRNLASVGIQWKDQDIENLYQNLGIKLRSLVERLCGRKEGNEHRETFSQIPDCHLNKKSQTGVKPCKCSVCGKVFLRHSFLDRHMRAHAGHKRSECGGEWRETPRKQKQHGKASISPSSGARRTVTPTRKRPYECKVCGKAFNSPNLFQIHQRTHTGKRSYKCREIVRAFTVSSFFRKHGKMHTGEKRYECKYCGKPIDYPSLFQIHVRTHAGEKPYKCKQCGKAFISAGYLRTHEIRSHALEKSHQCQECGKKLSCSSSLHRHERTHSGGKLYECQKCAKVFRCPTSLQAHERAHTGERPYECNKCGKTFNYPSCFRRHKKTHSGEKPYECTRCGKAFGWCSSLRRHEMTHTGEKPFDCKQCGKVFTFSNYLSLLQARADMPGWFFVFW

SEQ ID NO: 6 - protein, 686 aa, Homo sapiens
  misc_feature: Incyte ID No: 456487CD1
MGNILTCRVHPSVSLEFDQQQGSVCPSESEIYEAGAGDRMAGAPMAAAVQPAEVTVEVGEDLHMHHVRDREMPEALEFNLSANPEASTIFQRNSQTDALEFNPSANPEASTIFQRNSQTDVVEIRRSNCTNHVSTVRFSQQYSLCSTIFLDDSTAIQHYLTMTIISVTLEIPHHITQRDADRSLSIPDEQLHSFAVSTVHIMKKRNGGGSLNNYSSSIPSTPSTSQEDPQFSVPPTANTPTPVCKRSMRWSNLFTSEKGSDPDKERKAPENHADTIGSGRAIPIKQGMLLKRSGKWLKTWKKKYVTLCSNGMLTYYSSLGDYMKNIHKKEIDLQTSTIKVPGKWPSLATSACTPISSSKSNGLSKDMDTGLGDSICFSPSISSTTSPKLNPPPSPHANKKKHLKKKSTNNFMIVSATGQTWHFEATTYEERDAWVQAIQSQILASLQSCESSKSKSQLTSQSEAMALQSIQNMRGNAHCVDCETQNPKWASLNLGVLMCIECSGIHRSLGTRLSRVRSLELDDWPVELRKVMSSIGNDLANSIWEGSSQGQTKPSEKSTREEKERWIRSKYEEKLFLAPLPCTELSLGQQLLRATADEDLQTAILLLAHGSREEVNETCGEGDGCTALHLACRKGNVVLAQLLIWYGVDVMARDAHGNTALTYARQASSQECINVLLQYGCPDKCV

SEQ ID NO: 7 - protein, 348 aa, Homo sapiens
  misc_feature: Incyte ID No: 490256CD1
MTTALEPEDQKGLLIIKAEDHYWGQDSSSQKCSPHRRELYRQHFRKLCYQDAPGPREALTQLWELCRQWLRPECHTKEQILDLLVLEQSLSILPKDLQAWVRAHHPETGEEAVTVLEDLERELDEPGKQVPGNSERRDILMDKLAPLGRPYESLTVQLHPKKTQLEQEAGKPQRNGDKTRTKNEELFQKEDMPKDKEFLGEINDRLNKDTPQHPKSKDIIENEGRSEWQQRERRRYKCDECGKSFSHSSDLSKHRRTHTGEKPYKCDECGKAFIQRSHLIGHHRVHTGVKPYKCKECGKDFSGRTGLIQHQRIHTGEKPYECDECGRPFRVSSALIRHQRIHTANKLY

SEQ ID NO: 8 - protein, 181 aa, Homo sapiens
  misc_feature: Incyte ID No: 494740CD1
MEEIPAQEAAGSPRVQFQSLETQSECLSPEPQFVQDTDMEQGLTGAPPVPQVPALPREASPGDQAAALLTARYQEFVTFEDVAVHLTREEWGYLDPVQRDLYREVMLENYGNVVSLGILLRLPTTRIHSVNSCPALSHTQASAFSGETLAVLTAGISKRWPKYRLPIDIARPCSETPFPRL

SEQ ID NO: 9 - protein, 126 aa, Homo sapiens
  misc_feature: Incyte ID No: 507475CD1
MSVMDLANTCSSFQSDLDFCSDCGSVLPLPGAQDTVTCIRCGFNINVRDFEGKVVKTSVVFHQLGTAMPMSVEEGPECQGPVVDRRCPRCGHEGMAYHTRQMRSADEGQTVFYTCTNCKFQEKEDS

SEQ ID NO: 10 - protein, 610 aa, Homo sapiens
  misc_feature: Incyte ID No: 531581CD1
MQYSHHCEHLLERLNKQREAGFLCDCTIVIGEFQFKAHRNVLASFSEYFGAIYRSTSENNVFLDQSQVKADGFQKLLEFIYTGTLNLDSWNVKEIHQAADYLKVEEVVTKCKIKMEDFAFIANPSSTEISSITGNIELNQQTCLLTLRDYNNREKSEVSTDLIQANPKQGALAKKSSQTKKKKKAFNSPKTGQNKTVQYPSDILENASVELFLDANKLPTPVVEQVAQINDNSELELTSVVENTFPAQDIVHTVTVKRKRGKSQPNCALKEHSMSNIASVKSPYEAENSGEELDQRYSKAKPMCNTCGKVFSEASSLRRHMRIHKGVKPYVCHLCGKAFTQCNQLKTHVRTHTGEKPYKCELCDKGFAQKCQLVFHSRMHHGEEKPYKCDVCNLQFATSSNLKIHARKHSGEKPYVCDRCGQRFAQASTLTYHVRRHTGEKPYVCDTCGKAFAVSSSLITHSRKHTGEKPYICGICGKSFISSGELNKHFRSHTGERPFICELCGNSYTDIKNLKKHKTKVHSGADKTLDSSAEDHTLSEQDSIQKSPLSETMDVKPSDMTLPLALPLGTEDHHMLLPVTDTQSPTSDTLLRSTVNGYSEPQLIFLQQLY

SEQ ID NO: 11 - protein, 111 aa, Homo sapiens
  misc_feature: Incyte ID No: 675190CD1
MKNATIVMSVRREQGSSSGEGSLSFEDVAVGFTREEWQFLDQSQKVLYKEVMLENYINLVSIGYRGTKPDSLFKLEQGEPPGIAEGAAHSQICPGYSFRRRTLQMEGMQES

SEQ ID NO: 12 - protein, 152 aa, Homo sapiens
  misc_feature: Incyte ID No: 685434CD1
MLYLATRIEQENVINHTDEEGFTPLMWAAAHGQIAVVEFLLQNGADPQLLGKGRESALSLACSKGYTDIVKMLLDCGVDVNEYDWNGGTPLLYAVHGNHVKCVKMLLESGADPTIETDSGYNSMDLAVALGYRSVQQVIESHLLKLLQNIKE

SEQ ID NO: 13 - protein, 131 aa, Homo sapiens
  misc_feature: Incyte ID No: 788663CD1
MADVVVGKDKGGEQRLISLPLSRIRVIMKSSPEVSSINQEALVLTAKATELFVQCLATYSYRHGSGKEKKVLTYSDLANTAQQSETFQFLADILPKKILASKYLKMLKEEKREEDEENDNDNESDHDEADS

SEQ ID NO: 14 - protein, 541 aa, Homo sapiens
  misc_feature: Incyte ID No: 870100CD1
MPRRKQSHPQPVKCEGVKVDTEDSLDEGPGALVLESDLLLGQDLEFEEEEEEEEGDGNSDQLMGFERDSEGDSLGARPGLPYGLSDDESGGGRALSAESEVEEPARGPGEARGERPGPACQLCGGPTGEGPCCGAGGPGGGPLLPPRLLYSCRLCTFVSHYSSHLKRHMQTHSGEKPFRCGRCPYASAQLVNLTRHTRTHTGEKPYRCPHCPFACSSLGNLRRHQRTHAGPPTPPCPTCGFRCCTPRPARPPSPTEQEGAVPRRPEDALLLPDLSLHVPPGGASFLPDCGQLRGEGEGLCGTGSEPLPELLFPWTCRGCGQELEEGEGSRLGAAMCGRCMRGEAGGGASGGPQGPSDKGFACSLCPFATHYPNHLARHMKTHSGEKPFRCARCPYASAHLDNLKRHQRVHTGEKPYKCPLCPYACGNLANLKRHGRIHSGDKPFRCSLCNYSCNQSMNLKRHMLRHTGEKPFRCATCAYTTGHWDNYKRHQKVHGHGGAGGPGLSASEGWAPPHSPPSVLSSRGPPALGTAGSRAVHTDSS

SEQ ID NO: 15 - protein, 1828 aa, Homo sapiens
  misc_feature: Incyte ID No: 879500CD1
MPTPTLVRPLLKLVHSPSPEVSASAPGAAPLTISSPLHVPSSLPGPASSPMPIPNSSPLASPVSSTVSVPLSSSLPISVPTTLPAPASAPLTIPISAPLTVSASGPALLTSVTPPLAPVVPAAPGPPSLAPSGASPSASALTLGLATAPSLSSSQTPGHPLLLAPTSSHVPGLNSTVAPACSPVLVPASALASPFPSAPNPAPPLAPLPVLAPSPGAAPVLASSQTPVPVMAPSSTPGTSLASASPVPAPTPVLAPSSTQTMLPAPVPSPLPSPASTQTLALAPALAPTLGGSSPSQTLSLGTGNPQGPFPTQTLSLTPASSLVPTPAQTLSLAPGPPLGPTQTLSLAPAPPLAPASPVGPAPAHTLTLAPASSSASLLAPASVQTLTLSPAPVPTLGPAAAQTLALAPASTQSPASQASSLVVSASGAAPLPVTMVSRLPVSKDEPDTLTLRSGPPSPPSTATSFGGPRPRRQPPPPPRSPFYLDSLEEKRKRQRSERLERIFQLSEAHGALAPVYGTEVLDFCTLPQPVASPIGPRSPGPSHPTFWTYTEAAHRAVLFPQQRLDQLSEIIERFIFVMPPVEAPPPSLHACHPPPWLAPRQAAFQEQLASELWPRARPLHRIVCNMRTQFPDLRLIQYDCGKLQTLAVLLRQLKAEGHRVLIFTQMTRMLDVLEQFLTYHGHLYLRLDGSTRVEQRQALMERFNADKRIFCFILSTRSGGVGVNLTGADTVVFYDSDWNPTMDAQAQDRCHRIGQTRDVHIYRLISERTVEENILKKANQKRMLGDMAIEGGNFTTAYFKQTIRELFDMPLEEPSSSSVPSAPEEEEETVASKQTHILEQALCRAEDEEDIRAATQAKAEQVAELAEFNENDGFPAGEGEEAGRPGAEDEEMSRAEQEIAALVEQLTPIERYAMKFLEASLEEVSREELKQAEEQVEAARKDLDQAKEEVFRLPQEEEEGPGAGDESSCGTGGGTHRRSKKAKAPERPGTRVSERLRGARAETQGANHTPVISAHQTRSTTTPPRCSPARERVPRPAPRPRPTPASAPAAIPALVPVPVSAPVPISAPNPITILPVHILPSPPPPSQIPPCSSPACTPPPACTPPPAHTPPPAQTCLVTPSSPLLLGPPSVPISASVTNLPLGLRPEAELCAQALASPESLELASVASSETSSLSLVPPKDLLPVAVEILPVSEKNLSLTPSAPSLTLEAGSIPNGQEQEAPDSAEGTTLTVLPEGEELPLCVSESNGLELPPSAASDEPLQEPLEADRTSEELTEAKTPTSSPEKPQELVTAEVAAPSTSSSATSSPEGPSPARPPRRRTSADVEIRGQGTGRPGQPPGPKVLRKLPGRLVTVVEEKELVRRRRQQRGAASTLVPGVSETSASPGSPSVRSMSGPESSPPIGGPCEAAPSSSLPTPPQQPFIARRHIELGVTGGGSPENGDGALLAITPPAVKRRRGRPPKKNRSPADAGRGVDEAPSSTLKGKTNGADPVPGPETLIVADPVLEPQLIPGPQPLGPQPVHRPNPLLSPVEKRRRGRPPKARDLPIPGTISSAGDGNSESRTQPPPHPSPLTPLPPLLVCPTATVANTVTTVTISTSPPKRKRGRPPKNPPSPRPSQLPVLDRDSTSVLESCGLGRRRQPQGQGESEGSSSDEDGSRPLTRLARLRLEAEGMRGRKSGGSMVVAVIQDDLDLADSGPGGLELTPPVVSLTPKLRSTRLRPGSLVPPLETEKLPRKRAGAPVGGSPGLAKRGRLQPPSPLGPEGSVEESEAEASGEEEEGDGTPRRRPGPRRLVGTTNQGDQRILRSSAPPSLAGPAVSHRGRKAKT

SEQ ID NO: 16 - protein, 482 aa, Homo sapiens
  misc_feature: Incyte ID No: 975377CD1
MAEAATPGTTATTSGAGAAAATAAAASPTPIPTVTAPSLGAGGGGGGSDGSGGGWTKQVTCRYFMHGVCKEGDNCRYSHDLSDSPYSVVCKYFQRGYCIYGDRCRYEHSKPLKQEEATATELTTKSSLAASSSLSSIVGPLVEMNTGEAESRNSNFATVGAGSEDWVNAIEFVPGQPYCGRTAPSCTEAPLQGSVTKEESEKEQTAVETKKQLCPYAAVGECRYGENCVYLHGDSCDMCGLQVLHPMDAAQRSQHIKSCIEAHEKDMELSFAVQRSKDMVCGICMEVVYEKANPSERRFGILSNCNHTYCLKCIRKWRSAKQFESKIIKSCPECRITSNFVIPSEYWVEEKEEKQKLILKYKEAMSNKACRYFDEGRGSCPFGGNCFYKHAYPDGRREEPQRQKVGTSSRYRAQRRNHFWELIEERENSNPFDNDEEEVVTFELGEMLLMLLAAGGDDELTDSEDEWDLFHDELEDFYDLDL

SEQ ID NO: 17 - protein, 264 aa, Homo sapiens
  misc_feature: Incyte ID No: 1208721CD1
MLGILIYIQNSDYEEITIDPTCSWKPVPVKPDMHIKEEPDGPALKRCRTVSPAHVLMPSVMEMIAALGPGAAPFAPLQPPSVPAPSDYPGQGSSFLGPGTFPESFPPTTPSTPTLAEFTPGPPPISYQSDIPSSLLTSEKSTACLPSQMAPAGHLDPTHNPGTPGLHTSNLGAPPGPQLHHSNPPPASRQSLGQASLGPTGELAFSPATGVMGPPSMSGAGEAPEPALDLLPELTNPDELLSYLGPPDLPTNNNDDLLSLFENN

SEQ ID NO: 18 - protein, 350 aa, Homo sapiens
  misc_feature: Incyte ID No: 1234329CD1
MPPPYASLTRPLHHQASACPHSHGNPPPQTQPPPQVDYVIPHPVHAFHSQISSHATSHPVAPPPPTHLASTAAPIPQHLPPTHQPISHHIPATAPPAQRLHPHEVMQRMEVQRRRMMQHPTGLFVFCVSRRAHERPPPHPHRMHPNYGHGHHIHVPQTMSSHPRQAPERSAWELGIEAGVTAATYTPGALHPHLAHYHAPPRLHHLQLGALPLMVPDMAGYPHIRYISSGLDGTSFRGPFRGNFEELIHLEERLGNVNRGASQGTIERCTYPHKYKKRKLHCKQDGEEGTEEDTEEKCTICLSILEEGEDVRRLPCMHLFHQVCVDQWLITNKKCPICRVDIEAQLPSES

SEQ ID NO: 19 - protein, 549 aa, Homo sapiens
  misc_feature: Incyte ID No: 1238747CD1
MFTMTRAMEEALFQHFMHQKLGIAYAIHKPFPFFEGLLDNSIITKRMYMESLEACRNLIPVSRVVHNILTQLERTFNLSLLVTLFSQINLREYPNLVTIYRSFKRVGASYERQSRDTPILLEAPTGLAEGSSLHTPLALPPPQPPQPSCSPCAPRVSEPGTSSQQSDEILSESPSPSDPVLPLPALIQEGRSTSVTNDKLTSKMNAEEDSEEMPSLLTSTVQVASDNLIPQIRDKEDPQEMPHSPLGSMPEIRDNSPEPNDPEEPQEVSSTPSDKKGKKRKRCIWSTPKRRHKKKSLPRGTASSRHGIQKKLKRVDQVPQKKDDSTCNSTVETRAQKARTECARKSRSEEIIDGTSEMNEGKRSQKTPSTPRRVTQGAASPGHGIQEKLQVVDKVTQRKDDSTWNSEVMMRVQKARTKCARKSRSKEKKKEKDICSSSKRRFQKNIHRRGKPKSDTVDFHCSKLPVTCGEAKGILYKKKMKHGSSVKCIRNEDGTWLTPNEFEVEGKGRNAKNWKRNIRCEGMTLGELLKSGLLLCPPRINLKRELNSK

SEQ ID NO: 20 - protein, 337 aa, Homo sapiens
  misc_feature: Incyte ID No: 1265980CD1
MLTLPFDESVVMPESQMCRKFSRECEDQKQIKKPESFSKQIVLRGKSIKRAPGEETEKEEEEEDREEEDENGLPRRRGLRKKKTTKLRLERVKFRRQEANARERNRMHGLNDALDNLRKVVPCYSRTQKLSKIETLRLAKNYIWALSEILRIGKRPDLLTFVQNLCKGLSQPTTNLVAGCLQLNARSFLMGQGGEAAHHTRSPYSTFYPPYHSPELTTPPGHGTLDNSKSMKPYNYCSAYESFYESTSPECASPQFEGPLSPPPINYNGIFSLKQEETLDYGKNYNYGMHYCAVPPRGPLGQGAMFRLPTDSHFPYDLHLRSQSLTMQDELNAVFHN

SEQ ID NO: 21 - protein, 581 aa, Homo sapiens
  misc_feature: Incyte ID No: 1297333CD1
MVKRELTGSLFSGQRSVHETQELFPKQDSYAEGVTDRTSNTKLDCSSFRENWDSDYVFGRKLAVGQETQFRQEPITHNKTLSKERERTYNKSGRWFYLDDSEEKVHNRDSIKNFQKSSVVIKQTGIYAGKKLFKCNECKKTFTQSSSLTVHQRIHTGEKPYKCNECGKAFSDGSSFARHQRCHTGKKPYECIECGKAFIQNTSLIRHWRYYHTGEKPFDCIDCGKAFSDHIGLNQHRRIHTGEKPYKCDVCHKSFRYGSSLTVHQRIHTGEKPYECDVCRKAFSHHASLTQHQRVHSGEKPFKCKECGKAFRQNIHLASHLRIHTGEKPFECAECGKSFSISSQLATHQRIHTGEKPYECKVCSKAFTQKAHLAQHQKTHTGEKPYECKECGKAFSQTTHLIQHQRVHTGEKPYKCMECGKAFGDNSSCTQHQRLHTGQRPYECIECGKAFKTKSSLICHRRSHTGEKPYECSVCGKAFSHRQSLSVHQRIHSGKKPYECKECRKTFIQIGHLNQHKRVHTGERSYNYKKSRKVFRQTAHLAHHQRIHTGESSTCPSLPSTSNPVDLFPKFLWNPSSLPSP

SEQ ID NO: 22 - protein, 591 aa, Homo sapiens
  misc_feature: Incyte ID No: 1312824CD1
MAAVVQQNDLVFEFASNVMEDERQLGDPAIFPAVIVEHVPGADILNSYAGLACVEEPSDMITESSLDVAEEEIIDDDDDDITLTVEASCHDGDETIETIEAAEALLNMDSPGPMLDEKRINNNIFSSPEDDMVVAPVTHVSVTLDGIPEVMETQQVQEKYADSPGASSPEQPKRKKGNTIYLWEFLLALLQDKATCPKYIKWTQREKGIFKLVDSKAVSRLWGKHKNKPDMNYETMGRALRYYYQRGILAKVEGQRLVYQFKEMPKDLIYINDEDPSSSIESSDPSLSSSATSNRNQTSRSRVSSSPGVKGGATSVLKPGNSKAAKPKDPVEVAQPSEVLRTVQPTQSPYPTQLFRTVHVVQPVQAVPEGEAARTSTMQDETLNSSVQSIRTIQAPTQVPVVVSPRNQQLHTVTLQTVPLTTVIASTDPSAGTGSQKFILQAIPSSQPMTVLKENVMLQSQKAGSPPSIVLGPAQVQQVLTSNVQTICNGTVSVASSPSFSATAPVVTFSPRSSQLVAHPPGTVITSVIKTQETKTLTQEVEKKESEDHLKENTEKTEQQPQPYVMVVSSSNGFTSQVAMKQNELLEPNSF

SEQ ID NO: 23 - protein, 767 aa, Homo sapiens
  misc_feature: Incyte ID No: 1359294CD1
MSFDPNLLHNNGHNGYPNGTSAALRETGVIEKLLTSYGFIQCSERQARLFFHCSQYNGNLQDLKVGDDVEFEVSSDRRTGKPIAVKLVKIKQEILPEERMNGQEVFYLTYTPEDVEGNVQLETGDKINFVIDNNKHTGAVSARNIMLLKKKQARCQGVVCAMKEAFGFIERGDVVKEIFFHYSEFKGDLETLQPGDDVEFTIKDRNGKEVATDVRLLPQGTVIFEDISIEHFEGTVTKVIPKVPSKNQNDPLPGRIKVDFVIPKELPFGDKDTKSKVTLLEGDHVRFNISTDRRDKLERATNIEVLSNTFQFTNEAREMGVIAAMRDGFGFIKCVDRDVRMFFHFSEILDGNQLHIADEVEFTVVPDMLSAQRNHAIRIKKLPKGTVSFHSHSDHRFLGTVEKEATFSNPKTTSPNKGKEKEAEDGIIAYDDCGVKLTIAFQAKDVEGSTSPQIGDKVEFSISDKQRPGQQVATCVRLLGRNSNSKRLLGYVATLKDNFGFIETANHDKEIFFHYSEFSGDVDSLELGDMVEYSLSKGKGNKVSAEKVNKTHSVNGITEEADPTIYSGKVIRPLRSVDPTQTEYQGMIEIVEEGDMKGEVYPFGIVGMANKGDCLQKGESVKFQLCVLGQNAQTMAYNITPLRRATVECVKDQFGFINYEVGDSKKLFFHVKEVQDGIELQAGDEVEFSVILNQRTGKCSACNVWRVCEGPKAVAAPRPDRLVNRLKNITLDDASAPRLMVLRQPRGPDNSMGFGAERKIRQAGVID

SEQ ID NO: 24 - protein, 206 aa, Homo sapiens [sequence omitted]

SEQ ID NO: 25 - protein, 352 aa, Homo sapiens
  misc_feature: Incyte ID No: 1383473CD1
MESGGRPSLCQFILLGTTSVVTAALYSVYRQKARVSQELKGAKKVHLGEDLKSILSEAPGKCVPYAVIEGAVRSVKETLNSQFVENCKGVIQRLTLQEHKMVWNRTTHLWNDCSKIIHQRTNTVPFDLVPHEDGVDVAVRVLKPLDSVDLGLETVYEKFHPSIQSFTDVIGHYISGERPKGIQETEEMLKVGATLTGVGELVLDNNSVRLQPPKQGMQYYLSSQDFDSLLQRQESSVRLWKVLALVFGFATCATLFFILRKQYLQRQERLRLKQMQEEFQEHEAQLLSRAKPEDRESLKSACVVCLSSFKSCVFLECGHVCSCTECYRALPEPKKCPICRQAITRVIPLYNS

SEQ ID NO: 26 - protein, 532 aa, Homo sapiens
  misc_feature: Incyte ID No: 1388860CD1
MMFQDSVAFEDVAVSFTQEEWALLDPSQKNLYRDVMQETFKNLTSVGKTWKVQNIEDEYKNPRRNLSLMREKLCESKESHHCGESFNQIADDMLNRKTLPGITPCESSVCGEVGTGHSSLNTHIRADTGHKSSEYQEYGENPYRNKECKKAFSYLDSLQSHDKACTKEKPYDGKECTETFISHSCIQRHRVMHSGDGPYKCKFCGKAFYFLNLCLIHERIHTGVKPYKCKQCGKAFTRSTTLPVHERTHTGVNADECKECGNAFSFPSEIRRHKRSHTGEKPYECKQCGKVFISFSSIQYHKMTHTGEKPYECKQCGKAFRCGSHLQKHGRTHTGEKPYECRQCGKAFRCTSDLQRHEKTHTEDKPYGCKQCGKGFRCASQLQIHERTHSGEKPHECKECGKVFKYFSSLRIHERTHTGEKPHECKQCGKAFRYFSSLHIHERTHTGDKPYECKVCGKAFTCSSSIRYHERTHTGEKPYECKHCGKAFISNYIRYHERTHTGEKPYQCKQCGKAFIRASSCREHERTHTINR

SEQ ID NO: 27 - protein, 444 aa, Homo sapiens
  misc_feature: Incyte ID No: 1395322CD1
MERYLSTTPETTHCRKQPRPVRIQTLVGNIHIKQEMEDDYDYYGQQRVQILERNESEECTEDTDQAEGTESEPKGESFDSGVSSSIGTEPDSVEQQFGPGAARDSQAEPTQPEQAAEAPAEGGPQTNQLETGASSPERSNEVEMDSTVITVSNSSDKSVLQQPSVNTSIGQPLPSTQLYLRQTETLTSNLRMPLTLTSNTQVIGTAGNTYLPALFTTQPAGSGPKPFLFSLPQPLAGQQTQFVTVSQPGLSTFTAQLPAPQPLASSAGHSTASGQGEKKPYECTLCNKTFTAKQNYVKHMFVHTGEKPHQCSICWRSFSLKDYLIKLMVTHTGVRAYQCSICNKRFTQKSSLNVHMRLHRGEKSYECYICKKKFSHKTLLERHVALHSASNGTPPAGTPPGARAGPPGVVACTEGTTYVCSVCPAKFDQIEQFNDHMRMHVSDG

SEQ ID NO: 28 - protein, 347 aa, Homo sapiens
  misc_feature: Incyte ID No: 1419370CD1
MSFVLSRMAACGGTCKNKVTVSKPVWDFLSKETPARLARLREEHRVSILIDGETSDIYVLQLSPQGPPPAPPNGLYLARKALKGLLKEAEKELKKAQRQGELMGCLALGGGGEHPEMHRAGPPPLRAAPLLPPGARGLPPPPPPLPPPLPPRLREEAEEQESTCPICLGEIQNAKTLEKCRHSFCEGCITRALQVKKACPMCGRFYGQLVGNQPQNGRMLVSKDATLLLPSYEKYGTIVIQYVFPPGVQGAEHPNPGVRYPGTTRVAYLPDCPEGNKVLTLFRKAFDQRLTFTIGTSMTTGRPNVITWNDIHHKTSCTGGPQLFGYPDPTYLTRVQEELRAKGITDD

SEQ ID NO: 29 - protein, 308 aa, Homo sapiens
  misc_feature: Incyte ID No: 1429773CD1
MQPSGHRLRDVEHHPLLAENDNYDSSSSSSSEADVADRVWFIRDGCGMICAVMTWLLVAYADFVVTFVMLLPSKDFWYSVVNGVIFNCLAVLALSSHLRTMLTDPGAVPKGNATKEYMESLQLKPGEVIYKCPKCCCIKPERAHHCSICKRCIRKMDHHCPWVNNCVGEKNQRFFVLFTMYIALSSVHALILCGFQFISCVRGQWTECSDFSPPITVILLIFLCLEGLLFFTFTAVMFGTQIHSICNDETEIERLKSEKPTWERRLRWEGMKSVFGGPPSLLWMNPFVGFRFRRLPTRPRKGGPEFSV

SEQ ID NO: 30 - protein, 80 aa, Homo sapiens
  misc_feature: Incyte ID No: 1470820CD1
MCYIYPFVFLRLDSMKELHKTNRQQHEKHLQSRVDSTRAIERLEGSSGGIGERYKFLQEMRGYVQDLLECFSEKVRMQKY

SEQ ID NO: 31 - protein, 570 aa, Homo sapiens
  misc_feature: Incyte ID No: 1483455CD1
MPQVTFNDVAIDFTHEEWGWLSSAQRDLYKDVMVQNYENLVSVGLSVTKPYVITLLEDGKEPWMMEKKLSKGMIPDWESRWENKELSTKKDNYDEDSPQTVIIEKVVKQSYEFSNSKKNLEYIEKLEGKHGSQVDHFRPAILTSRESPTADSVYKYNIFRSTFHSKSTLSEPQKISAEGNSHKYDILKKNLPKKSVIKNEKVNGGKKLLNSNKSGAAFSQGKSLTLPQTCNREKIYTCSECGKAFGKQSILNRHWRIHTGEKPYECRECGKTFSHGSSLTRHLISHSGEKPYKCIECGKAFSHVSSLTNHQSTHTGEKPYECMNCGKSFSRVSHLIEHLRIHTQEKLYECRICGKAFIHRSSLIHHQKIHTGEKPYECRECGKAFCCSSHLTRHQRIHTMEKQYECNKCLKVFSSLSFLVQHQSIHTEEKPFECQKCRKSFNQLESLNMHLRNHIRLKPYECSICGKAFSHRSSLLQHHRIHTGEKPYECIKCGKTFSCSSNLTVHQRIHTGEKPYKCNECGKAFSKGSNLTAHQRVHNGEKPNSVVSVEKPLDYMNHYTCEKSYRRETV

SEQ ID NO: 32 - protein, 390 aa, Homo sapiens
  misc_feature: Incyte ID No: 1527064CD1
MRGDRGRGRGGRFGSRGGPGGGFRPFVPHIPFDFYLCEMAFPRVKPAPDETSFSEALLKRNQDLAPNSAEQASILSLVTKINNVIDNLIVAPGTFEVQIEEVRQVGSYKKGTMTTGHNVADLVVILKILPTLEAVAALGNKVVESLRAQDPSEVLTMLTNETGFEISSSDATVKILITTVPPNLRKLDPELHLDIKVLQSALAAIRHARWFEENASQSTVKVLIRLLKDLRIRFPGFEPLTPWILDLLGHYAVMNNPTRQPLALNVAYRRCLQILAAGLFLPGSVGITDPCESGNFRVHTVMTLEQQDMVCYTAQTLVRILSHGGFRKILGQEGDASYLASEISTWDGVIVTPSEKAYEKPPEKKEGEEEEENTEEPPQGEEEESMETQE

SEQ ID NO: 33 - protein, 601 aa, Homo sapiens
  misc_feature: Incyte ID No: 1557491CD1
MNESAPGTYVVQNPHSSELPTLNFQDTVNTLTNSPAIPLETSACQDIPTSANVQNAEGTKWGEEALKMDLDNNFYSTEVSVSSTENAVSSDLRAGDVPVLSLSNSSENAASVISYSGSAPSVIVHSSQFSSVIMHSNAIAAMTSSNHRAFSDPAVSQSLKDDSKPEPDKVGRFASRPKSIKEKKKTTSHTRGEIPEESNYVADPGGSLSKTTNIAEETSKIETYIAKPALPGTSTNSNVAPLCQITVKIGNEAIVKRHILGSKLFYKRGRRPKYQMQEEPLPQGNDPEPSGDSPLGLCQSECMEMSEVFDDASDQDSTDKPWRPYYNYKPKKKSRQLKKMRKVNWRKEHGNRSPSHKCKYPAELDCAVGKAPQDKPFEEEETKEMPKLQCELCDGDKAVGAGNQGRPHRHLTSRPYACELCAKQFQSPSTLKMHMRCHTGEKPYQCKTCGRCFSVQGNLQKHERIHLGLKEFVCQYCNKAFTLNETLKIHERIHTGEKRYHCQFCFQRFLYLSTKRNHEQRHIREHNGKGYACFQCPKICKTAAALGMHQKKHLFKSPSQQEKIGDVCHENSNPLENQHFIGSEDNDQKDNIQTGVENVVL

SEQ ID NO: 34 - protein, 834 aa, Homo sapiens
  misc_feature: Incyte ID No: 1576862CD1
MEEKRRKYSISSDNSDTTDSHATSTSASRCSKLPSSTKSGWPRQNEKKPSEVFRTDLITAMKIPDSYQLSPDDYYILADPWRQEWEKGVQVPAGAEAIPEPVVRILPPLEGPPAQASPSSTMLGEGSQPDWPGGSRYDLDEIDAYWLELINSELKEMERPELDELTLERVLEELETLCHQNMARAIETQEGLGIEYDEDVVCDVCRSPEGEDGNEMVFCDKCNVCVHQACYGILKVPTGSWLCRTCALGVQPKCLLCPKRGGALKPTRSGTKWVHVSCALWIPEVSIGCPEKMEPITKISHIPASRWALSCSLCKECTGTCIQCSMPSCVTAFHVTCAFDHGLEMRTILADNDEVKFKSFCQEHSDGGPRNEPTSEPTEPSQAGEDLEKVTLRKQRLQQLEEDFYELVEPAEVAERLDLAEALVDFIYQYWKLKRKANANQPLLTPKTDEVDNLAQQEQDVLYRRLKLFTHLRQDLERVRNLCYMVTRRERTKHAICKLQEQIFHLQMKLIEQDLCRERSGRRAKGKKSDSKRKGCEGSKGSTEKKEKVKAGPDSVLGQLAGLSTSFPIDGTFFNSWLAQSVQITAENMAMSEWPLNNGHREDPAPGLLSEELLQDEETLLSFMRDPSLRPGDPARKARGRTRLPAKKKPPPPPPQDGPGSRTTPDKAPKKTWGQDAGSGKGGQGPPTRKPPRRTSSHLPSSPAAGDCPILATPESPPPLAPETPDEAASVAADSDVQVPGPAASPKPLGRLRPPRESKVTRRLPGARPDAGMGPPSAVAERPKVSLHFDTETDGYFSDGEMSDSDVEAEDGGVQRGPREAGAEEVVRMGVLAS

SEQ ID NO: 35 - protein, 499 aa, Homo sapiens
  misc_feature: Incyte ID No: 1609731CD1
MAQGLVTFRDVAIEFSLEEWKCLEPAQRDLYREVTLENFGHLASLGLSISKPDVVSLLEQGKEPWMIANDVTGPWCPDLESRCEKFLQKDIFEIGAFNWEIMESLKCSDLEGSDFRADWECEGQFERQVNEECYFKQVNVTYGHMPVFQHHTSHTVRQSRETGEKLMECHECGKAFSRGSHLIQHQKTHTGEKPFGCKECGKAFSRASHLVQHQRIHTGEKPYDCKDCGKAFGRTSELILHQRLHTGVKPYECKECGKTFRQHSQLILHQRTHTGEKPYVCKDCGKAFIRGSQLTVHRRIHTGARPYECKECGKAFRQHSQLTVHQRIHTGEKPYECKECGKGFIHSSEVTRHQRNSFWGEPYECKECGKAFRQHAQLTRHQRVHTGDRPYECKDCGKAFSRSSYLIQHQRIHTGDKPYECKECGKAFIRVSQLTHHQRIHTCEKPYECRECGMAFIRSSQLTEHQRIHPGIKPYECRECGQAFILGSQLIEHYRIHTG

SEQ ID NO: 36 - protein, 402 aa, Homo sapiens
  misc_feature: Incyte ID No: 1674538CD1
MYTSEEKCNQRTQKRKIYNVCPRKGKKIFIHMHEIIQIDGHIYQCLECKQNFCENLALIMCERTHTGEKPYKCDMCEKTFVQSSDLTSHQRIHNYEKPYKCSKCEKSFWHHLALSGHQRTHAGKKFYTCDICGKNFGQSSDLLVHQRSHTGEKPYLCSECDKCFSRSTNLIRHRRTHTGEKPFKCLECEKAFSGKSDLISHQRTHTGERPYKCNKCEKSYRHRSAFIVHKRVHTGEKPYKCGACEKCFGQKSDLIVHQRVHTGEKPYKCLECMRSFTRSANLIRHQATHTHTFKCLEYEKSFNCSSDLIVHQRIHMEEKPHQWSACESGFLLGMDFVAQQKMRTQTEELHYKYTVCDKSFHQSSALLQHQTVHIGEKPFVCNVSEKGLELSPPHASEASQMS

SEQ ID NO: 37 - protein, 579 aa, Homo sapiens [sequence omitted]

SEQ ID NO: 38 - protein, 426 aa, Homo sapiens
  misc_feature: Incyte ID No: 1693903CD1
MPPKKQAQAGGSKKAEQKKKEKIIEDKTFGLKNKKGAKQQKFIKAVTHQVKFGQQNPRQVAQSEAEKKLKKDDKKKELQELNELFKPVVAAQKISKGADPKSVVCAFFKQGQCTKGDKCKFSHDLTLERKCEKRSVYIDARDEELEKDTMDNWDEKKLEEVVNKKHGEAEKKKPKTQIVCKHFLEAIENNKYGWFWVCPGGGDICMYRHALPPGFVLKKDKKKEEKEDEISLEDLIERERSALGPNVTKITLESFLAWKKRKRQEKIDKLEQDMERRKADFKAGKALVISGREVFEFRPELVNDDDEEADDTRYTQGTGGDEVDDSVSVNDIDLSLYIPRDVDETGITVASLERFSTYTSDKDENKLSEASGGRAENGERSDLEEDNEREGTENGAIDAVPVDENLFTGEDLDELEEELNTLDLEE

SEQ ID NO: 39 - protein, 266 aa, Homo sapiens
  misc_feature: Incyte ID No: 1702962CD1
MGSKTLPAPVPIHPSLQLTNYSFLQAVNGLPTVPSDHLPNLYGFSALHAVHLHQWTLGYPAMHLPRSSFSKVPGTVSSLVDARFQLPAFPWFPHVIQPKPEITAGGSVPALKTKPRFDFANLALAATQEDPAKLGRREGPGSPAGGLGALLDVTKLSPEKKPTRGRLPSKTKKEFVCKFCGRQFTKSYNLLIHERTHTDERPYTCDICHKAFRRQDHLRDHRYIHSKEKPFKCQECGKGFCQSRTLAVHKTLHSQVKELKTSKIKC

SEQ ID NO: 40 - protein, 358 aa, Homo sapiens
  misc_feature: Incyte ID No: 1712916CD1
MNTIVFNKLSGAVLFEDGGASERERGGRPYSGVLDSPHARPEVGIPDGPPLKDNLGLRHRRTGARQNGGKVRHKRQALQDMARPLKQWLYKHRDNPYPTKTEKILLALGSQMTLVQVSNWFANARRRLKNTVRQPDLSWALRIKLYNKYVQGNAERLSVSSDDSCSEDGENPPRTHMNEGGYNTPVHHPVIKSENSVIKAGVRPESRASEDYVAPPKYKSSLLNRYLNDSLRHVMATNTTMMGKTRQRNHSGSFSSNEFEEELVSPSSSETEGNFVYRTDTLENGSNKGESARNRKGPSKDDTYWKEINAAMALTNLAQGKDKLQGTTSCIIQKSSHIAGVRLSSAVVHSLRACAFSQ

SEQ ID NO: 41 - protein, 260 aa, Homo sapiens
  misc_feature: Incyte ID No: 1748313CD1
MMDPCSVGVQLRTTNECHKTYYTRHTGFKTLQELSSNDMLLLQLRTGMTLSGNNTICFHHVKIYIDRFEDLQKSCCDPFNIHKKLAKKNLHVIDLDDATFLSAKFGRQLVPGWKLCPKCTQIINGSVDVDTEDRQKRKPESDGRTAKALRSLQFTNPGRQTEFAPETGKREKRRLTKNATAGSDRQVIPAKSKVYDSQGLLIFSGMDLCDCLDEDCLGCFYACPACGSTKCGAECRCDRKWLYEQIEIEGGEIIHNKHAG

SEQ ID NO: 42 - protein, 263 aa, Homo sapiens
  misc_feature: Incyte ID No: 1754833CD1
MVLPPPQLPQTRAGHRWSTWTSTCSRCRRATDSLLSASSMTASRSPRSLLGRRLTTAGTLRAGGRETIRPGTGTAPDSPAPASPRGGPPAGTKASPRWKGSSSSSSTASSRPPPSPAWAPWGVLHSNPMDYAWGANGLDAIITQLLNQFENTGPPPADKEKIQALPTVPVTEEHVGSGLECPVCKDDYALGERVRQLPCNHLFHDGCIVPWLEQHDSCPVCRKSLTGQNTATNPPGLTGVSFSSSSSSSSSSSPSNENATSNS

SEQ ID NO: 43 - protein, 581 aa, Homo sapiens
  misc_feature: Incyte ID No: 1798701CD1
MDEDYYGSAAEWGDEADGGQQEDDSGEGEDDAEVQQECLHKFSTRDYIMEPSIFNTLKRYFQAGGSPENVIQLLSENYTAVAQTVNLLAEWLIQTGVEPVQVQETVENYLKSLLIKHFDPRKADSIFTEEGETPAWLEQMIAHTTWRDLFYKLAEAHPDCLMLNFTVKLISDAGYQGEITSVSTACQQLEVFSRVLRTSLATILDGGEENLEKNLPEFAKMVCHGEHTYLFAQAMMSVLAQEEQGGSAVRRIAQEVQRFAQEKGHDASQITLALGTAASYPRACQALGAMLSKGALNPADITVLFKMFTSMDPPPVELIRVPAFLDLFMQSLFKPGARINQDHKHKYIHILAYAASVVETWKKNKRVSINKDELKSTSKAVETVHNLCCNENKGASELVAELSTLYQCIRFPVVAMGVLKWVDWTVSEPRYFQLQTDHTPVHLALLDEISTCHQLLHPQVLQLLVKLFETEHSQLDVMEQLELKKTLLDRMVHLLSRGYVLPVVSYIRKCLEKLDTDISLIRYFVTEVLDVIAPPYTSDFVQLFLPILENDSIAGTIKTEGEHDPVTEFIAHCKSNFIMVN

SEQ ID NO: 44 - protein, 117 aa, Homo sapiens
  misc_feature: Incyte ID No: 1842496CD1
MQKSCEENEGKPQNMPKAEEDRPLEDVPQEAEGNPQPSEEGVSQEAEGNPRGGPNQPGQGFKEDTPVRHLDPEEMIRGVDELERLREEIRRVRNKFVMMHWKQRHSRSRPYPVCFRP

SEQ ID NO: 45 - protein, 202 aa, Homo sapiens
  misc_feature: Incyte ID No: 1868613CD1
MAKVSVLNVAVLENPSPFHSPFRFEISFECSEALADDLEWKIIYVGSAESEEFDQILDSVLVGPVPAGRHMFVFQADAPNPSLIPETDAVGVTVVLITCTYHGQEFIRVGYYVNNEYLNPELRENPPMKPDFSQLQRNILASNPRVTRFHINWDNNMDRLEAIETQDPSLGCGLPLNCTPIKGLGLPGCIPGLLPENSMDCI

SEQ ID NO: 46 - protein, 442 aa, Homo sapiens
  misc_feature: Incyte ID No: 1870609CD1
MLVAKLIQCIVFGPLRVSERQSLLVTVRTAHVILRYVIHLWDLNHEGTWEGKGTYVYYTDFVMELTLLSLDLMHHIHMLLFGNIWLSMASLVIFMQLRYLFHEVQRRIRRHKNYLRVVGNMEARFAVATPEELAVNNDDCAICWDSMQAARKLPCGHLFHNSCLRSWLEQDTSCPTCRMSLNIADNNRVREEHQGENLDENLVPVAAAEGRPRLNQHNHFFHFDGSRIASWLPSFSVEVMHTTNILGITQASNSQLNAMAHQIQEMFPQVPYHLVLQDLQLTRSVEITTDNILEGRIQVPFPTQRSDSIRPALNSPVERPSSDQEEGETSAQTERVPLDLSPRLEETLDFGEVEVEPSEVEDFEARGSRFSKSADERQRMLVQRKDELLQQARKRFLNKSSEDDAASESFLPSEGASSDPVTLRRRMLAAAAERRLQKQQTS

SEQ ID NO: 47 - protein, 765 aa, Homo sapiens
  misc_feature: Incyte ID No: 1871961CD1
MFSQQQQQQLQQQQQQLQQLQQQQLQQQQLQQQQLLQLQQLLQQSPPQAPLPMAVSRGLPPQQPQQPLLNLQGTNSASLLNGSMLQRALLLQQLQGLDQFAMPPATYDTAGLTMPTATLGNLRGYGMASPGLAAPSLTPPQLATPNLQQFFPQATRQSLLGPPPVGVPMNPSQFNLSGRNPQKQARTSSSTTPNRKDSSSQTMPVEDKSDPPEGSEEAAEPRMDTPEDQDLPPCPEDIAKEKRTPAPEPEPCEASELPAKRLRSSEEPTEKEPPGQLQVKAQPQARMTVPKQTQTPDLLPEALEAQVLPRFQPRVLQVQAQVQSQTQPRIPSTDTQVQPKLQKQAQTQTSPEHLVLQQKQVQPQLQQEAEPQKQVQPQVQPQAHSQGPRQVQLQQEAEPLKQVQPQVQPQAHSQPPRQVQLQLQKQVQTQTYPQVHTQAQPSVQPQEHPPAQVSVQPPEQTHEQPHTQPQVSLLAPEQTPVVVHVCGLEMPPDAVEAGGGMEKTLPEPVGTQVSMEEIQNESACGLDVGECENRAREMPGVWGAGGSLKVTILQSSDSRAFSTVPLTPVPRPSDSVSSTPAATSTPSKQALQFFCYICKASCSSQQEFQDHMSEPQHQQRLGEIQHMSQACLLSLLPVPRDVLETEDEEPPPRRWCNTCQLYYMGDLIQHRRTQDHKIAKQSLRPFCTVCNRYFKTPRKFVEHVKSQGHKDKAKELKSLEKEIAGQDEDHFITVDAVGCFEGDEEEEEDDEDEEEIEVEEELCSR

SEQ ID NO: 48 - protein, 352 aa, Homo sapiens
  misc_feature: Incyte ID No: 1876258CD1
MPRSFLVKSRKAHTYHQPRVQEDEPLWPPALTPVPRDQAPSNSPVLSTLFPNQCLDWTNLKREPELEQDQNLARMAPAPEGPIVLSRPQDGDSPLSDSPPFYKPSFSWDTLATTYGHSYRQAPSTMQSAFLEHSVSLYGSPLVPSTEPALDFSLRYSPGMDAYHCVKCNKVFSTPHGLEVHVRRSHSGTRPFACDICGKTFGHAVSLEQHTHVHSQGIPAGSSPEPAPDPPGPHFLRQERSFECRMCGKTFKRSSTLSTHLLIHSDTRPYPCQFCGKRFHQKSDMKKHTYIHTGEKPHKCQVCGKAFSQSSNLITHSRKHTGFKPFSCELCTKGFQRKVDLRRHRESQHNLK

SEQ ID NO: 49 - protein, 1102 aa, Homo sapiens
  misc_feature: Incyte ID No: 1929822CD1
MFQLPVNNLGSLRKARKTVKKILSDIGLEYCKEHIEDFKQFEPNDFYLKNTTWEDVGLWDPSLTKNQDYRTKPFCCSACPFSSKFFSAYKSHFRNVHSEDFENRILLNCPYCTFNADKKTLETHIKIFHAPNASAPSSSLSTFKDKNKNDGLKPKQADSVEQAVYYCKKCTYRDPLYEIVRKHIYREHFQHVAAPYIAKAGEKSLNGAVPLGSNAREESSIHCKRCLFMPKSYEALVQHVIEDHERIGYQVTAMIGHTNVVVPRSKPLMLIAPKPQDKKSMGLPPRIGSLASGNVRSLPSQQMVNRLSIPKPNLNSTGVNMMSSVHLQQNNYGVKSVGQGYSVGQSMRLGLGGNAPVSIPQQSQSVKQLLPSGNGRSYGLGSEQRSQAPARYSLQSANASSLSSGQLKSPSLSQSQASRVLGQSSSKPAAAATGPPPGNTSSTQKWKICTICNELFPENVYSVHFEKEHKAEKVPAVANYIMKIHNFTSKCLYCNRYLPTDTLLNHMLIHGLSCPYCRSTFNDVEKMAAHMRMVHIDEEMGPKTDSTLSFDLTLQQGSHTNIHLLVTTYNLRDAPAESVAYHAQNNPPVPPKPQPKVQEKADIPVKSSPQAAVPYKKDVGKTLCPLCFSILKGPISDALAHHLRERHQVIQTVHPVEKKLTYKCIHCLGVYTSNMTASTITLHLVHCRGVGKTQNGQDKTNAPSRLNQSPSLAPVKRTYEQMEFPLLKKRKLDDDSDSPSFFEEKPEEPVVLALDPKGHEDDSYEARKSFLTKYFNKQPYPTRREIEKLAASLWLWKSDIASHFSNKRKKCVRDCEKYKPGVLLGFNMKELNKVKHEMDFDAEWLFENHDEKDSRVNASKTADKKLNLGKEDDSSSDSFENLEEESNESGSPFDPVFEVEPKISNDNPEEHVLKVIPEDASESEEKLDQKEDGSKYETIHLTEEPTKLMHNASDSEVDQDDVVEWKDGASPSESGPGSQQVSDFEDNTCEMKPGTWSDESSQSEDARSSKPAAKKKATMQGDREQLKWKNSSYGKVEGFWSKDQSQWKNASENDERLSNPQIEWQNSTIDSEDGEQFDNMTDGVAEPMHGSLAGVKLSSQQA

SEQ ID NO: 50 - protein, 121 aa, Homo sapiens
  misc_feature: Incyte ID No: 1970095CD1
MGRIFLDHIGGTRLFSCANCDTILTNRSELISTRFTGATGRAFLFNKVVNLQYSEVQDRVMLTGRHMVRDVSCKNCNSKLGWIYEFATEDSQRYKEGRVILERALVRESEGFEEHVPSDNS

SEQ ID NO: 51 - protein, 233 aa, Homo sapiens [sequence omitted]

SEQ ID NO: 52 - protein, 147 aa, Homo sapiens
  misc_feature: Incyte ID No: 1976527CD1
MAERPEDLNLPNAVITRIIKEALPDGVNISKEARSAISRAASVFVLYATSCANNFAMKGKRKTLNASDVLSAMEEMEFQRFVTPLKEALEAYRREQKGKKEASEQKKKDKDKKTDSEEQDKSRDEDNDEDEERLEEEEQNEEEEVDN

SEQ ID NO: 53 - protein, 96 aa, Homo sapiens
  misc_feature: Incyte ID No: 2108023CD1
MAEVEETLKRIQSHKGVIGTMVVNAEGIPIRTTLDNSTTVQYAGLLHHLTMKAKSTVRDIDPQNDLTFLRIRSKKHEIMVAPDKEYLLIVIQNPCE

SEQ ID NO: 54 - protein, 259 aa, Homo sapiens [sequence omitted]

SEQ ID NO: 55 - protein, 474 aa, Homo sapiens
  misc_feature: Incyte ID No: 2154810CD1
MALRSVMFSDVSIDFSPEGWEYLDLEQKDLYRDVMLENYSNLVSLGCFISKPDVISSLEQGKEPWKVVRKGRRQYPDLETKYETKKLSLENDIYEINLSQWKIMERIENHGLKGLILKNDWESTGKIEGQERPQEGYFSSVKMPSEKVSSYQKRTSVTPHQRLHFVDKPYECKECGKAFRVRQQLTFHHRIHTGEKPYECKECGMAFRQTAHLTRHQRIHTGEKPYECKECGKAFSRGYHLSQHQKIHTGEKPFECKECGKAFSWGSSLVKHERVHTGEKSHECKECGKTFCSGYQLTRHQVFHTGEKPYECKECGKAFNCGSSLVQHERIHTGEKPYECKECGKAFSRGYHLTQHQKIHTGEKPFKCKECGKAFSWGSSLVKHERVHTNEKSYECKDCGKAFGSGYQLSVHQRFHTGEKLYQHKEFGKTFTRGSKLVHERTHSNDKPYECNECGEAFLWTTYSNEKIDTDETL

SEQ ID NO: 56 - protein, 231 aa, Homo sapiens
  misc_feature: Incyte ID No: 2228991CD1
MSHGNKEVFSCRGILLAVNWFLERGHTDITVFVPSWRKEQPRPDVPITDQHILRELEKKKILVFTPSRRVGGKRVVCYDDRFIVKLAYESDGIVVSNDTYRDLQGERQEWKRFIEERLLMYSFVNDKFMPPDDPLGRHGPSLDNFLRKKPLTLEHRKQPCPYGRKCTYGIKCRFFHPERPSCPQRSVADELRANALLSPPRAPSKDKNGRRPSPSSQSSSLLTESEQCSLD

SEQ ID NO: 57 - protein, 456 aa, Homo sapiens
  misc_feature: Incyte ID No: 2241206CD1
MDSRLQEIRERQKLRRQLLAQQLGAESADSIGAVLNSKDEQREIAETRETCRASYDTSAPNAKRKYLDEGETDEDKMEEYKDELEMQQDEENLPYEEEIYKDSSTFLKGTQSLNPHNDYCQHFVDTGHRPQNFIRDVGLADRFEEYPKLRELIRLKDELIAKSNTPPMYLQADIEAFDIRELTPKFDVILLEPPLEEYYRETGITANEKCWTWDDIMKLEIDEIAAPRSFIFLWCGSGEGLDLGRVCLRKWGYRRCEDICWIKTNKNNPGKTKTLDPKAVFQRTKEHCLMGIKGTVKRSTDGDFIHANVDIDLIITEEPEIGNIEKPVEIFHIIEHFCLGRRRLHLFGRDSTIRPGWLTVGPTLTNSNYNAETYASYFSAPNSYLTGCTEEIERLRPKSPPPKSKSDRGGGAPRGGGRGGTSAGRGRERNRSNFRGERGGFRGGRGGAHRGGFPPR

SEQ ID NO: 58 - protein, 159 aa, Homo sapiens
  misc_feature: Incyte ID No: 2259590CD1
MSAAIPPPQASAKPFLGPWRQPVSSRRAEAAPRTLCAFYTTAGTEVPRSPEPEPGVGRARRTGFLADSHGLTQPPGPMAAPALALVSFEDVVVTFTGEEWGHLDLAQRTLYQEVMLETCRLLVSLGHPVPKPELIYLLEHGQELWTVKRGLSQSTCAGW

SEQ ID NO: 59 - protein, 260 aa, Homo sapiens
  misc_feature: Incyte ID No: 2307537CD1
MPVDFCTTRVSPAHRSPTVLCQKVCEENSVSPIGCNSSDPADFEPIPSFSGFPLDSPKTLVLDFETEGERNSPNPRSVRIPSPNILKTGLTENVDRGLGGLEGTHQALDLLAGGMMPEEVKESSQLDKQESLGLELKTINSAGLGPSPCLPDLVDFVTRTSGVQKDKLCSPLSEPGDPSKCSSLELGPLQLEISNASTTEVAILQVDDDSGDPLNLVKAPVSRSPPREQVIEDNMVPQGMPEQETTVGAIQDHTESSVHN

SEQ ID NO: 60 - protein, 352 aa, Homo sapiens; identical to SEQ ID NO: 48
  misc_feature: Incyte ID No: 2440675CD1

SEQ ID NO: 61 - protein, 467 aa, Homo sapiens
  misc_feature: Incyte ID No: 2463542CD1
MRTYVCHICSIAFTSLDMFRSHMQGGEHQIKESIVINLVKNSRKTQDSYQNECADYINVQKARGLEAKTCFRKMEESSLETCRYREVVDSRPRHRMFEQRLPFETFRTYAAPYNISQAMEKQLPHSKKTYDSFQDELEDYIKVQKARGLDPKTCFRKMRENSVDTHGYREMVDSGPRSRMCEQRFSHEASQTYQRPYHISPVESQLPQWLPTHSKRTYDSFQDELEDYIKVQKARGLEPKTCFRKIGDSSVETHRNREMVDVRPRHRMLEQKLPCETFQTYSGPYSISQVVENQLPHCLPAHDSKQRLDSISYCQLTRDCFPEKPVPLSLNQQENNSGSYSVESEVYKHLSSENNTADHQAGHKRKHQKRKRHLEEGKERPEKEQSKHKRKKSYEDTDLDKDKSIRQRKREEDRVKVSSGKLKHRKKKKSHDVPSEKEERKHRKEKKKSVEERTEEEMLWDESILGF

SEQ ID NO: 62 - protein, 550 aa, Homo sapiens
  misc_feature: Incyte ID No: 2486031CD1
MVRGWEPPPGLDCAISEGHKSEGTMPPNKEASGLSSSPAGLICLPPISEELQLVWTQAAQTSELDSNEHLLKTFSYFPYPSLADIALLCLRYGLQMEKVKTWFMAQRLRCGISWSSEEIEETRARVVYRRDQLHFKSLLSFTHHAGRPPEEVPPPPVPAPEQVGIGIGPPTLSKPTQTKGLKVEPEEPSQMPPLPQSHQKLKESLMTPGSGAFPYQSDFWQHLQSSGLSKEQAGRGPNQSHGIGTASWNHSTTVPQPQARDKPPPIALIASSCKEESASSVTPSSSSTSSSFQVLANGATATSKPLQPLGCVPQSVSPSEQALPPHLEPAWPQGLRHNSVPGRVGPTEYLSPDMQRQRKTKRKTKEQLAILKSFFLQCQWARREDYQKLEQITGLPRPEIIQWFGDTRYALKHGQLKWFRDNAVPGAPSFQDPAIPTPPPSTRSLNERAETPPLPIPPPPPDIQPLERYWAAHQQLRETDIPQLSQASRLSTQQVLDWFDSRLPQPAEVVVCLDEEEEEEEEELPEDDEEEEEEEEEDDDDDDDDVIIQD

SEQ ID NO: 63 - protein, 450 aa, Homo sapiens
  misc_feature: Incyte ID No: 2493052CD1
MAASKTQGAVARMQEDRDGSCSTVGGVGYGDSKDCILEPLSLPESPGGTTTLEGSPSVPCIFCEEHFPVAEQDKLLKHMIIEHKIVIADVKLVADFQRYILYWRKRFTEQPITDFCSVIRINSTAPFEEQENYFLLCDVLPEDRILREELQKQRLREILEQQQQERNDTNFHGVCMFCNEEFLGNRSVILNHMAREHAFNIGLPDNIVNCNEFLCTLQKKLDNLQCLYCEKTFRDKNTLKDHMRKKQHRKINPKNREYDRFYVINYLELGKSWEEVQLEDDRELLDHQEDDWSDWEEHPASAVCLFCEKQAETIEKLYVHMEDAHEFDLLKIKSELGLNFYQQVKLVNFIRRQVHQCRCYGCHVKFKSKADLRTHMEETKHTSLLPDRKTWDQLEYYFPTYENDTLLCTLSDSESDLTAQEQNENVPIISEDTSKLYALKQSSILNQLLL

SEQ ID NO: 64 - protein, 378 aa, Homo sapiens
  misc_feature: Incyte ID No: 2512074CD1
MISFQESVTFQDVAVDFTAEEWQLLDCAERTLYWDVMLENYRNLISVGCPITKTKVILKVEQGQEPWMVEGANPHESSPESDYPLVDEPGKHRESKDNFLKSVLLTFNKILTMERIHHYNMSTSLNPMRKKSYKSFEKCLPPNLDLLKYNRSYTVENAYECSECGKAFKKKFHFIRHEKNHTRKKPFECNDCGKAYSRKAHLATHQKIHNGERPFVCNDCGKAFMHKAQLVVHQRLHTGEKPYECSQCGKTFTWNSSFNQHVKSHTLEKSFECKECGKTFRYSSSLYKHSRFHTGEKPYQCIICGKAFGNTSVLVTHQRIHTGEKPYSCIECGKAFIKKSHLLRHQITHTGEKPYECNRCGKAFSQKSNLIVHQKIHT

SEQ ID NO: 65 - protein, 233 aa, Homo sapiens [sequence omitted]

SEQ ID NO: 66 - protein, 102 aa, Homo sapiens
  misc_feature: Incyte ID No: 2672566CD1
MLSVDMENKENGSVGVKNSMENGRPPDPADWAVMDVVNYFRTVGFEEQASAFQEQEIDGKSLLLMTRNDVLTGLQLKLGPALKIYEYHVKPLQTKHLKNNSS

SEQ ID NO: 67 - protein, 287 aa, Homo sapiens
  misc_feature: Incyte ID No: 2689674CD1
MAASLWMGDLEPYMDENFISRAFATMGETVMSVKIIRNRLTGIPAGYCFVEFADLATAEKCLHKINGKPLPGATPAKRFKLNYATYGKQPDNSPEYSLFVGDLTPDVDDGMLYEFFVKVYPSCRGGKVVLDQTGVSKGYGFVKFTDELEQKRALTECQGAVGLGSKPVRLSVAIPKASRVKPVEYSQMYSYSYNQYYQQYQNYYAQWGYDQNTGSYSYSYPQYGYTQSTMQTYEEVGDDALEDPMPQLDVTEANKEFMEQSEELYDALMDCHWQPLDTVSSEIPAMM

SEQ ID NO: 68 - protein, 208 aa, Homo sapiens
  misc_feature: Incyte ID No: 2703282CD1
MKKNEVYETFSYPESYSPTLPVSRRENNSPSNLPRPSFCMEEYQRAELEEDPILSRTPSPVHPSDFSEHNCQPYYASDGATYGSSSGLCLGNPRADSIHNTYSTDHASAAPPSVTRSPVENDGYIEEGSITKHPSTWSVEAVVLFLKQTDPLALCPLVDLFRSHEIDGKALLLLTSDVLLKHLGVKLGTAVKLCYYIDRLKQGKCFEN

SEQ ID NO: 69 - protein, 177 aa, Homo sapiens
  misc_feature: Incyte ID No: 2738293CD1
MSKLSFRARALDAAKPLPIYRGKDMPDLNDCVSINRAVPQMPTGMEKEEESEHHLQRAISAQQVFREKKESMVIPVPEAESNVNYYNRLYKGEFKQPKQFIHIQRIWGHYQPETTLKFLLVCFVHLFLDHSISFNLGCRSAQGSVLRKIFCFSFLPKGKLRNTKFFAFPFCMANLFL

SEQ ID NO: 70 - protein, 179 aa, Homo sapiens
  misc_feature: Incyte ID No: 2772776CD1
MAATEPILAATGSPAAVPPEKLEGAGSSSAPERNCVGSSLPEASPPAPEPSSPNAAVPEAIPTPRAAASAALELPLGPAPVSVAPQAEAEARSTPGPAGSRLGPETFRQRFRQFRYQDAAGPREAFRQLRELSRQWLRPDIRTKEQIVEMLVQEQLLAILPEAARARRIRRRTDVRITG

SEQ ID NO: 71 - protein, 212 aa, Homo sapiens
  misc_feature: Incyte ID No: 2774476CD1
MDPAGAADPSVPPNPLTHLSLQDRSEMQLQSEADRRSLPGTWTRSSPEHTTILRGGVRRCLQQQCEQTVRILHAKVAQKSYGNEKRFFCPPPCVYLSGPGWRVKPGQDQAHQAGETGPTVCGYMGLDSASGSATETQKLNFEQQPDSREFGCAKTLYISDADKRKHFRLVLRLVLRGGRELGTFHSRLIKVISKPSQKKQSLKNTDREQGGA

SEQ ID NO: 72 - protein, 256 aa, Homo sapiens
  misc_feature: Incyte ID No: 2804624CD1
MKLLENSSFEAINSQLTVETGDAHIIGRIESYSCKMAGDDKHMFKQFCQEGQPHVLEALSPPQTSGLSPSRLSKSQGGEEEGPLSDKCSRKTLFYLIATLNESFRPDYDFSTARSHEFSREPSLSWVVNAVNCSLFSAVREDFKDLKPQLWNAVDEEICLAECDIYSYNPDLDSDPFGEDGSLWSFNYFFYNKRLKRIVFFSCRSISGSTYTPSEAGNELDMELGEEEVEEESRSRGSGAEETSTMEEDRVPVICI

SEQ ID NO: 73 - protein, 475 aa, Homo sapiens
  misc_feature: Incyte ID No: 2848225CD1
MDAVAFEDVAVNFTQEEWALLGPSQKNLYRYVMQETIRNLDCIRMIWEEQNTEDQYKNPRRNLRCHMVERFSESKDSSQCGETFSLIRDSIVNNSICPGEDPCQSAECEEVIMGHLSLNSHIRVDSGHKPHEYQEYGEKPHTHKQRGKAFSYHHSFQSRGRPHTGKKRYECKECGKTFSSRRNLRRHMVVQGGNRPYKCKLCGKAFFWPSLLRMHERTHTGEKPYECKQCSKAFPFYSSYRRHERMHTGEKPYECKQCSKALPDSSSYIRHERTHTGEKPYTCKQCGKAFSVSSSLRRHETTHSAEKPYECKQCGKTFHHLGSFQIHMKRHTGDRPHKCKICGKGFDPSLVRYHERIHTGEKPYECKQCGKTLSHSSSFRRHMIMHTGGGPHKCKICGKAFVYPSVCQRHEKSHSGEKPYECKQCGKALSHSSSFRRHMVMHTGDGPNKCKVCGKAFVYPSVCQRHEKTHWRETI

SEQ ID NO: 74 - protein, 206 aa, Homo sapiens
  misc_feature: Incyte ID No: 2882241CD1
MEPLASNIQVLLQAAEFLERREREAEHGYASLCPHRSPGPIHRRKKRPPQAPGAQDSGRSVHNELEKRRRAQLKRCLERLKQQMPLGADCARYTTLSLLRRARMHIQKLEDQEQRARQLKERLRSKQQSLQRQLEQLRGLAGAAERERLRADSLDSSGLSSERSDSDQEELEVDVESLVFGGEAELLRGFVAGQEHSYSHGGGAWL

SEQ ID NO: 75 - protein, 596 aa, Homo sapiens
  misc_feature: Incyte ID No: 2939011CD1
MRRNKGDIKEFWPQQSQLSDFMKMANAEVSVPVGDVVVVPTEGNEGENPEDTKTQVILQLQPVQQGLFIDGHFYNRIYEAGSENNTAVVAVETHTIHKIEEGIDTGTIEANEDMEIAYPITCGESKAILLWKKFVCPGINVKCVKFNDQLISPKHFVHLAGKSTLKDWKRAIRLGGIMLRKMMDSGQIDFYQHDKVCSNTCRSTKFDLLISSARAPVPGQQTSVVQTPTSADGSITQIAISEESMEEAGLEWNSALTAAVTMATEEGVKKDSEEISEDTLMFWKGIADVGLMEEVVCNIQKEIEELLRGVQQRLIQAPFQVTDAAVLNNVAHTFGLMDTVKKVLDNRRNQVEQGEEQFLYTLTDLERQLEEQKKQGQDHRLKSQTVQNVVLMPVSTPKPPKRPRLQRPASTTVLSPSPPVQQPQFTVISPITITPVGQSFSMGNIPVATLSQGSSPVTVHTLPSGPQLFRYATVVSSAKSSSPDTVTIHPSSSLALLSSTAMQDGSTLGNMTTMVSPVELVAMESGLTSAIQAVESTSEDGQTIIEIDPAPDPEAEDTEGKAVILETELRTEEKVVAEMEEHQHQVHNVEIVVLED

SEQ ID NO: 76 - protein, 644 aa, Homo sapiens
  misc_feature: Incyte ID No: 2947188CD1
MLENYGNVASLGFPLLKPAVISQLEGGGELGGSSPLAAGTGLQGLQTVDIQTDNDLTKEMYEGKENVSFELQRDFSQETDFSEASLLEKQQEVHSAGNIKKEKSNTIDGTVKDETSPVEECFFSQSSNSYQCHTITGEQPSGCTGLGKSISFDTKLVKHEIINSEERPFKCEELVEPFRCDSQLIQHQENNTEEKPYQCSECGKAFSINEKLIWHQRLHSGEKPFKCVECGKSFSYSSHYITHQTIHSGEKPYQCKMCGKAFSVNGSLSRHQRIHTGEKPYQCKECGNGFSCSSAYITHQRVHTGEKPYECNDCGKAFNVNAKLIQHQRIHTGEKPYECNECGKGFRCSSQLRQHQSIHTGEKPYQCKECGKGFNNNTKLIQHQRIHTGEKPYECTECGKAFSVKGKLIQHQRIHTGEKPYECNECGKAFRCNSQFRQHLRIHTGEKPYECNECGKAFSVNGKLMRHQRIHTGEKPFECNECGRCFTSKRNLLDHHRIHTGEKPYQCKECGKAFSINAKLTRHQRIHTGEKPFKCMECEKAFSCSSNYIVHQRIHTGEKPFQCKECGKAFHVNAHLIRHQRSHTGEKPFRCVECGKGFSFSSDYIIHQTVHTWKKPYMCSVCGKAFRFSFQLSQHQSVHSEGKS

SEQ ID NO: 77 - protein, 194 aa, Homo sapiens
  misc_feature: Incyte ID No: 3094001CD1
MPSSPLRVAVVCSSNQNRSMEAHNILSKRGFSVRSFGTGTHVKLPGPAPDKPNVYDFKTTYDQMYNDLLRKDKELYTQNGILHMLDRNKRIKPRPERFQNCKDLFDLILTCEERVYDQVVEDLNSREQETCQPVHVVNVDIQDNHEEATLGAFLICELCQCIQHTEDMENEIDELLQEFEEKSGRTFLHTVCFY

SEQ ID NO: 78 - protein, 536 aa, Homo sapiens
  misc_feature: Incyte ID No: 3110061CD1
MAEMDPTQGRVVFEDVAIYFSQEEWGHLDEAQRLLYRDVMLENLALLSSLGSWHGAEDEEAPSQQGFSVGVSEVTTSKPCLSSQKVHPSETCGPPLKDILCLVEHNGIHPEQHIYICEAELFQHPKQQIGENLSRGDDWIPSFGKNHRVHMAEEIFTCMEGWKDLPATSCLLQHQGPQSEWKPYRDTEDREAFQTGQNDYKCSECGKTFTCSYSFVEHQKIHTGERSYECNKCGKFFKYSANFMKHQTVHTSERTYECRECGKSFMYNYRLMRHKRVHTGERPYECNTCGKFFRYSSTFVRHQRFHTGERPYECRECGKFFMDSSTLIKHQRVHTGERPYKCNDCGKFFRYISTLIRHQRIHTGERPYECSVCGELFRYNSSLVKHWRNHTGERPYKCSECGKSFRYHCRLIRHQRVHTGERPYECSECGKFFRYNSNLIKHWRNHTGERPYECRECGKAFSHKHILVEHQKIHSGERPYECSECQKAFIRKSHLVHHQKIHSEERLVCSMNVGNSLAKTPTSLNIRDFTMEKVYH

SEQ ID NO: 79 - protein, 412 aa, Homo sapiens
  misc_feature: Incyte ID No: 3146614CD1
MSFVAYEELIKEGDTAILSLGHGAMVAVRVQRGAQTQTRHGVLRHSVDLIGRPFGSKVTCGRGGWVYVLHPTPELWTLNLPHRTQILYSTDIALITMMLELRPGSVVCESGTGSGSVSHAIIRTIAPTGHLHTVEFHQQRAEKAREEFQEHRVGRWVTVRTQDVCRSGFGVSHVADAVFLDIPSPWEAVGHAWDALKVEGGRFCSFSPCIEQVQRTCQALAARRLLRAEHPGGAATGLQRAHCQPATARPGHRHRWPCRLRHQPLPQRHAHEGGRGPHRLPDLRHQDPRLGGRLPGHQGAGSTEGLGREARGTLYGQRCLPDTDGGVGLGGLLGGQSGTAGRAAVMEEQCWGWASAIPVQPCGPSQLLFVANMKYPLPQAPLGVEAKGCRWGSLTPSQVGLSRKGVEEGGGH

SEQ ID NO: 80 - protein, 482 aa, Homo sapiens
  misc_feature: Incyte ID No: 3295381CD1
MAKLYEAVTFKDVAVIFTEEELGLLDPAQRKLYRDVMLENFRNLLSVGHQPFHGDTFHFLREEKFWVMGTTSQREGNLGGEIQTEMETVPEAGTHEEFSCKQIWEQIASDLTGSQDTTISNSQLFEQDDNPSQIKARLSTVHTREKPFQGENCKQFFSDVSFFDLPQQLYSGEKSHTCDECGKSFCYISALHIHQRVHMGVKCYKCDVCGKEFSQSSRLQTHQRVHTGEKPFKCEQCGKGFRCRSALKVHCKLHMREKPYNCEKCGKAFMHNFQLQKHHRIHTGEKPFKCEICGKSFCLRSSLNRHCMVHTAEKLYKSEKYGRGFIDRLDLHKHQMIHMGQKPYNCKECGKSFKWSSYLLVHQRVHTGEKPYKCEECGKGYISKSGLDFHHRTHTGERSYNCDNCGKSFRHASSILNHKKLHCQRKPLKCEDCGKRLVCRSYCKDQQRDHSGENPSKCEDCGKRYKRRLNLDIILSLFLNDI

SEQ ID NO: 81 - protein, 554 aa, Homo sapiens
  misc_feature: Incyte ID No: 3364774CD1
MSADGGGIQDTQDKETPPEVPDRGHPHQEMPSKLGEAVPSGDTQESLHIKMEPEEPHSEGASQEDGAQGAWGWAPLSHGSKEKALFLPGGALPSPRIPVLSREGRTRDRQMAAALLTAWSQMPVTFEDVALYLSREEWGRLDHTQQNFYRDVLQKKNGLSLGFPFSRPFWAPQAHGKGEASGSSRQAGDEKEWRGACTGAVEVGQRVQTSSVAALGNVKPFRTRAGRVQWGVPQCAQEAACGRSSGPAKDSGQPAEPDRTPDAAPPDPSPTEPQEYRVPEKPNEEEKGAPESGEEGLAPDSEVGRKSYRCEQCGKGFSWHSHLVTHRRTHTGEKPYACTDCGKRFGRSSHLIQHQIIHTGEKPYTCPACRKSFSHHSTLIQHQRIHTGEKPYVCDRCAKRFTRRSDLVTHQGTHTGAKPHKCPICAKCFTQSSALVTHQRTHTGVKPYPCPECGKCFSQRSNLIAHNRTHTGEKPYHCLDCGKSFSHSSHLTAHQRTHRGVRPYACPLCGKSFSRRSNLHRHEKIHTTGPKALAMLMLGAAAAGALATPPPAPT

SEQ ID NO: 82 - protein, 488 aa, Homo sapiens
  misc_feature: Incyte ID No: 3397777CD1
MASKILLNVQEEVTCPICLELLTEPLSLDCGHSLCRACITVSNKEAVTSMGGKSSCPVCGISYSFEHLQANQHLANIVERLKEVKLSPDNGKKRDLCDHHGEKLLLFCKEDRKVICWLCERSQEHRGHHTVLTEEVFKECQEELQAVLKRLKTEEEEAEKLEADIREEKTSWKYQVQTERQRLQTEFDQLRSILNNEEQRELQRLEEEEKKTLDKFAEAEDELVQQKQLVRELISDVECRSQWSTMELLQDMSGIMKWSEIWRLKKPKMVSKKLKTVFHAPDLSRMLQMFRELTAVRCYWVDVTLNSVNLNLNLVLSEDQRQVISVPIWPFQWYNYGVLGSQYFSSGKHYWEVDVSKKTAWILGVYCRTYSRHMKYVVRRCANRQNLYTKYRPLFGYWVIGLQNKCKYGVFEESLSSDPEVLTLSMAVPPCRVGVFLDYEAGIVSFFNVTSHGSLIYKFSKCCFSQPVYPYFNPWNCPAPMTLCPPSS

SEQ ID NO: 83 - protein, 127 aa, Homo sapiens [sequence omitted]

SEQ ID NO: 84 - protein, 532 aa, Homo sapiens
  misc_feature: Incyte ID No: 3538506CD1
MRCDFCGAGFDTRAGLSSHARAHLRDFGITNWELTVSPINILQELLATSAAEQPPSPLGREPGGPPGSFLTSRRPRLPLTVPFPPTWAEDPGPAYGDASGPEPARDIRCEFCGEFFENRKGLSSHARSHLRQMGVTEWYVNGSPIDTLREILKRRTQSRPGGPPNPPGPSPKALAKMMGGAGPGSSLEARSPSDLHISPLAKKLPPPPGSPLGHSPTASPPPTARKMFPGLAAPSLPKKLKPEQIRVEIKREMLPGALHGELHPSEGPWGAPREDMTPLNLSSRAEPVRDIRCEFCGEFFENRKGLSSHARSHLRQMGVTEWSVNGSPIDTLREILKKKSKPCLIKKEPPAGDLAPALAEDGPPTVAPGPVQSPLPLSPLAGRPGKPGAGPAQVPRELSLTPITGAKPSATGYLGSVAAKRPLQEDRLLPAEVKAKTYIQTELPFKAKTLHEKTSHSSTEACCELCGLYFENRKALASHARAHLRQFGVTEWCVNGSPIETLSEWIKHRPQKVGAYRSYIQGGRKLIPFSEG

SEQ ID NO: 85 - protein, 353 aa, Homo sapiens
  misc_feature: Incyte ID No: 3575519CD1
MDYKSSLIQDGNPMENLEKQLICPICLEMFTKPVVILPCQHNLCRKCANDIFQAANPYWTSRGSSVSMSGGRFRCPTCRHEVIMDRHGVYGLQRNLLVENIIDIYKQECSSRPLQKGSHPMCKEHEDEKINIYCLTCEVPTCSMCKVFGIHKACEVAPLQSVFQGQKTELNNCISMLVAGNDRVQTIITQLEDSRRVTKENSHQVKEELSQKFDTLYAILDEKKSELLQRITQEQEKKLSFIEALIQQYQEQLDKSTKLVETAIQSLDEPGGATFLLTAKQLIKSIVEASKGCQLGKTEQGFENMDFFTLDLEHIADALRAIDFGTDEEEEEFIEEEDQEEEESTEGKEEGHQ

SEQ ID NO: 86 - protein, 407 aa, Homo sapiens
  misc_feature: Incyte ID No: 3598694CD1
MLSQIMENPLVQDMMSNPDLMRHMIMANPQMQQLMERNPEISHMLNNPELMRQTMELARNPAMMQEMMRNQDRALSNLESIPGGYNALRRMYTDIQEPMFSAAREQFGNNPFSSLAGNSDSSSSQPLRTENREPLPNPWSPSPPTSQAPGSGGEGTGGSGTSQVHPTVSNPFGINAASLGSGMFNSPEMQALLQQISENPQLMQNVISAPYMRSMMQTLAQNPDFAAQMMVNVPLFAGNPQLQEQLRLQLPVFLQQMQNPESLSILTNPRAMQALLQIQQGLQTLQTEAPGLVPSLGSFGMSRTPAPSAGSNAGSTPEAPTSSPATPATSSPTGASSAQQQLMQQMIQLLAGSGNSQVQTPEVRFQQQLEQLNSMGFINREANLQALIATGGDINAAIERLLGSQLS

SEQ ID NO: 87 - protein, 350 aa, Homo sapiens
  misc_feature: Incyte ID No: 3638819CD1
  unsure 301: unknown or other
MLLNPEEKSPLNISVGVHPLDSFTQGFGEQPTGDLPIGPPFEMPTGALLSTPQFEMLQNPLGLTGALRGPGRRGGRARGGQGPRPNICGICGKSFGRGSTPIQHQRIHTGEKPYKCEVCSKAFSQSSDLIKHQRTHTGERPYKCPRCGKAFADSSYLLRHQRTHSGQKPFKCPHCGKAFGDSSYLLRHQRTHSHERPYSCTECGKCYSQNSSLRSHQRVHTGQRPFSCGICGKSFSQRSALIPHARSHAREKPFKCLSCANVLAELGAGNPRPHPLGGGRGWGGLCGGVVGWGGCGGEWGXVGHGVGGVLGVVGVFCFFFAFWLFCFYPFRWLFFPRNPFGSLSFWFPPV

SEQ ID NO: 88 - protein, 215 aa, Homo sapiens
  misc_feature: Incyte ID No: 3717139CD1
MHVWPRWVPPPVSPELKDRKEDAKGMEDEGQTKIKQRRSRTNFTLEQLNELERLFDETHYPDAFMREELSQRLGLSEARVQVWFQNRRAKCRKQENQLHKGVLIGAASQFEACRVAPYVNVGALRMPFQQVQAQLQLDSAVAHAHHHLHPHLAAHAPYMMFPAPPFGLPLATLAADSASAASVVAAAAAAKTTSKNSSIADLRLKAKKHAAALGL

SEQ ID NO: 89 - protein, 489 aa, Homo sapiens
  misc_feature: Incyte ID No: 3892962CD1
MKELDPKNDISEDKLSVVGEATGGPTRNGARGPGSEGVWEPGSWPERPRGDAGAEWEPLGIPQGNKLLGGSVPACHELKAFANQGCVLVPPRLDDPTEKGACPPVRRGKNFSSTSDLSKPPMPCEEKKTYDCSECGKAFSRSSSLIKHQRIHTGEKPFECDTCGKHFIERSSLTIHQRVHTGEKPYACGDCGKAFSQRMNLTVHQRTHTGEKPYVCDVCGKAFRKTSSLTQHERIHTGEKPYACGDCGKAFSQNMHLIVHQRTHTGEKPYVCPECGRAFSQNMHLTEHQRTHTGEKPYACKECGKAFNKSSSLTLHQRNHTGEKPYVCGECGKAFSQSSYLIQHQRFHIGVKPFECSECGKAFSKNSSLTQHQRIHTGEKPYECYICKKHFTGRSSLIVHQIVHTGEKPYVCGECGKAFSQSAYLIEHQRIHTGEKPYRCGQCGKSFIKNSSLTVHQRIHTGEKPYRCGECGKTFSRNTNLTRHLRIHT

SEQ ID NO: 90 - protein, 399 aa, Homo sapiens
  misc_feature: Incyte ID No: 4153521CD1
MSQVTFSDVAIDFSHEEWACLDSAQRDLYKDVMVQNYENLVSVGLSVTKPYVIMLLEDGKEPWMMEKKLSKDWESRWENKELSTKKDIYDEDSPQPVTMEKVVKQSYEFSNSNKNLEYTECDTFRSTFHSKSTLSEPQNNSAEGNSHKYDILKKNLSKKSVIKSERINGGKKLLNSNKSGAAFNQSKSLTLPQTCNREKIYTCSECGKAFGKQSILSRHWRIHTGEKPYECRECGKTFSHGSSLTRHQISHSGEKPYKCIECGKAFSHGSSLTNHQSTHTGEKPYECMNCGKSFSRVSLLIQHLRIHTQEKRYECRICGKAFIHSSSLIHHQKSHTGEKPYECRECGKAFCCSSHLTQHQRIHSMKKKYECNKCLKVFSSFSFLVQHQSIHTEEKPFEV

SEQ ID NO: 91 - protein, 309 aa, Homo sapiens [sequence omitted]

SEQ ID NO: 92 - protein, 361 aa, Homo sapiens
  misc_feature: Incyte ID No: 4674640CD1
MALNVAPVRDTKWLTLEVCRQFQRGTCSRSDEECKFAHPPKSCQVENGRVIACFDSLKGRCSRENCKYLHPPTHLKTQLEINGRNNLIQQKTAAAMLAQQMQFMFPGTPLHPVPTFPVGPAIGTNTAISFAPYLAPVTPGVGLVPTEILPTTPVIVPGSPPVTVPGSTATQKLLRTDKLEVCREFQRGNCARGETDCRFAHPADSTMIDTSDNTVTVCMDYIKGRCMREKCKYFHPPAHLQAKIKAAQHQANQAAVAAQAAAAAATVMAFPPGALHPLPKRQALEKSNGTSAVFNPSVLHYQQALTSAQLQQHAAFIPTDNSEIISRNGMECQESALRITKHCYCTYYPVSSSIELPQTAC

SEQ ID NO: 93 - protein, 540 aa, Homo sapiens
  misc_feature: Incyte ID No: 4676066CD1
MPPCAVTPPPPTSQPNWLTLCLFPAGGSSQIHLSNTETSGRPCTRPPVRDPRQTPSQPARPPGVQERHQPGLQAPLAYYGTSWPLQSHLMHRYHSPVTPFSPLQGLGPECRSVASARPHTHGGCCPQAEQSKVLSAVEDRMDELGAGIAQSRRTVALIKSAAVAERERVSRLFADAAAALQGFQTQVLGFIEEGEAAMLGRSQGDLRRQEEQRSRLSRARQNLSQVPEADSVSFLQELLALRLALEDGCGPGPGPPRELSFTKSSQAVRAVRDMLAVACVNQWEQLRGPGGNEDGPQKLDSEADAEPQDLESTNLLESEAPRDYFLKFAYIVDLDSDTADKFLQLFGTKGVKRVLCPINYPLSPTRFTHCEQVLGEGALDRGTYYWEVEIIEGWVSMGVMAEDFSPQEPYDRGRLGRNAHSCCLQWNGRSFSVWFHGLEAPLPHPFSPTVGVCLEYADRALAFYAVRDGKMSLLRRLKASRPRRGGIPASPIDPFQSRLDSHFAGLFTHRLKPAFFLESVDAHLQIGPLKKSCISVLKRR

SEQ ID NO: 94 - protein, 84 aa, Homo sapiens
  misc_feature: Incyte ID No: 4830687CD1
MKVKIKCWNGVATWLWVANDENCGICRMAFNGCCPDCKVPGDDCPLVWGQCSHCFHMHCILKWLHAQQVQQHCPMCRQEWKFKE

SEQ ID NO: 95 - protein, 1312 aa, Homo sapiens
  misc_feature: Incyte ID No: 4880891CD1
MKALDEPPYLTVGTDVSAKYRGAFCEAKIKTAKRLVKVKVTFRHDSSTVEVQDDHIKGPLKVGAIVEVKNLDGAYQEAVINKLTDASWYTVVFDDGDEKTLRRSSLCLKGERHFAESETLDQLPLTNPEHFGTPVIGKKTNRGRRSNHIPEEESSSSSSDEDEDDRKQIDELLGKVVCVDYISLDKKKALWFPALVVCPDCSDEIAVKKDNILVRSFKDGKFTSVPRKDVHEITSDTAPKPDAVLKQAFEQALEFHKSRTIPANWKTELKEDSSSSEAEEEEEEEDDEKEKEDNSSEEEEEIEPFPEERENFLQQLYKFMEDRGTPINKRPVLGYRNLNLFKLFRLVHKLGGFDNIESGAVWKQVYQDLGIPVLNSAAGYNVKCAYKKYLYGFEEYCRSANIEFQMALPEKVVNKQCKECENVKEIKVKEENETEIKEIKMEEERNIIPREEKPIEDEIERKENIKPSLGSKKNLLESIPTHSDQEKEVNIKKPEDNENLDDKDDDTTRVDESLNIKVEAEEEKAKSGDETNKEEDEDDEEAEEEEEEEEEEEDEDDDDNNEEEEFECYPPGMKVQVRYGRGKNQKMYEASIKDSDVEGGEVLYLVHYCGWNVRYDEWIKADKIVRPADKNVPKIKHRKKIKNKLDKEKDKDEKYSPKNCKLRRLSKPPFQTNPSPEMVSKLDLTDAKNSDTAHIKSIEITSILNGLQASESSAEDSEQEDERGAQDMDNNGKEESKIDHLTNNRNDLISKEEQNSSSLLEENKVHADLVISKPVSKSPERLRKDIEVLSEDTDYEEDEVTKKRKDVKKDTTDKSSKPQIKRGKRRYCNTEECLKTGSPGKKEEKAKNKESLCMENSSNSSSDEDEEETKAKMTPTKKYNGLEEKRKSLRTTGFYSGFSEVAEKRIKLLNNSDERLQNSRAKDRKDVWSSIQGQWPKKTLKELFSDSDTEAAASPPHPAPEEGVAEESLQTVAEEESCSPSVELEKPPPVNVDSKPIEEKTVEVNDRKAEFPSSGSNSVLNTPPTTPESPSSVTVTEGSRQQSSVTVSEPLAPNQEEVRSIKSETDSTIEVDSVAGELQDLQSEGNSSPAGFDASVSSSSSNQPEPEHPEKACTGQKRVKDAQGGGSSSKKQKRSHKATVVNNKKKGKGTNSSDSEELSAGESITKSQPVKSVSTGMKSHSTKSPARTQSPGKCGKNGDKDPDLKEPSNRLPKVYKWSFQMSDLENMTSAERITILQEKLQEIRKHYLSLKSEVASIDRRRKRLKKKERESAATSSSSSSPSSSSITAAVMLTLAEPSMSSASQNGMSVECR

SEQ ID NO: 96 - protein, 504 aa, Homo sapiens [sequence omitted]

SEQ ID NO: 97 - protein, 227 aa, Homo sapiens
  misc_feature: Incyte ID No: 4911931CD1
MFKRMAEFGPDSGGRVKGVTIVKPIVYGNVARYFGKKREEDGHTHQWTVYVKPYRNEDMSAYVKKIQFKLHESYGNPLRVVTKPPYEITETGWGEFEIIIKIFFIDPNERPVTLYHLLKLFQSDTNAMLGKKTVVSEFYDEMIFQDPTAMMQQLLTTSRQLTLGAYKHETEFAELEVKTREKLEAAKKKTSFEIAELKERLKASRETINCLKNEIRKLEEDDQAKDI

SEQ ID NO: 98 - protein, 233 aa, Homo sapiens
  misc_feature: Incyte ID No: 4920433CD1
MAEDGLPKIYSHPPTESSKTPTAATIFFGADNAIPKSETTITSEGDHVTSVNEYMLESDFSTTTDNKLTAKKEKLKSEDDMGTDFIKSTTHLQKEITSLTGTTNSITRDSITEHFMPVKIGNISSPVTTVSLIDFSTDIAKEDILLATIDTGDAEISITSEVSGTLKDSSAGVADAPAFPRKKDEADMSNYNSSIKSNVPADEAVQVTDSIIPEAEILLLLKKPHYYSRHNCP

SEQ ID NO: 99 - protein, 511 aa, Homo sapiens
  misc_feature: Incyte ID No: 5042113CD1
MDEESLESALQTYRAQLQQVELALGAGLDSSEQADLRQLQGDLKELIELTEASLVSVRKSRLLAALDEERPGRQEDAEYQAFREAITEAVEAPAAARGSGSETVPKAEAGPESAAGGQEEEEGEDEEELSGTKVSAPYYSSWGTLEYHNAMVVGTEEAEDGSAGVRVLYLYPTHKSLKPCPFFLEGKCRFKENCRFSHGQVVSLDELRPFQDPDLSSLQAGSACLAKHQDGLWHAARITDVDNGYYTVKFDSLLLREAVVEGDGILPPLRTEATESDSDSDGTGDSSYARVVGSDAVDSGTCSSAFAGWEVHTRGIGSRLLTKMGYEFGKGLGRHAEGRVEPIHAVVLPRGKSLDQCVETLQKQTRVGKAGTNKPPRCRGRGARPGGRPAPRNVFDFLNEKLQGQAPGALEAGAAPAGRRSKDMYHASKSAKRALSLRLFQTEEKIERTQRDIRSIQEALARNAGRHSVASAQLQEKLAGAQRQLGQLRAQEAGLQQEQRKADTHKKMTEF

SEQ ID NO: 100 - protein, 247 aa, Homo sapiens
  misc_feature: Incyte ID No: 5083853CD1
MEVLESGEQGVLQWDRKLSELSEPGDGEALMYHTHFSELLDEFSQNVLGQLLNDPFLSEKSVSMEVEPSPTSPAPLIQAEHSYSLCEEPRAQSPFTHITSDSFNDDEVESEKWYLSTDFPSTSIKTEPITDEPPPGLVPSVTLTITAISTPLEKEEPPLEMNTGVDSSCQTIIPKIKLEPHEVDQFLNFSPKEGLSALPVSLWVMDMVSGSTEREYGERAGMSLYHRCCSWLYEIALFLKNKNFASK

SEQ ID NO: 101 - protein, 276 aa, Homo sapiens
  misc_feature: Incyte ID No: 5283981CD1
MGSKALPAPIPLHPSLQLTNYSFLQAVNTFPATVDHLQGLYGLSAVQTMHMNHWTLGYPNVHEITRSTITEMAAAQGLVDARFPFPALPFTTHLFHPKQGAIAHVLPALHKDRPRFDFANLAVAATQEDPPKMGDLSKLSPGLGSPISGLSKLTPDRKPSRGRLPSKTKKEFICKFCGRHFTKSYNLLIHERTHTDERPYTCDICHKAFRRQDHLRDHRYIHSKEKPFKCQECGKGFCQSRTLAVHKTLHMQTSSPTAASSAAKCSGETVICGGTA

SEQ ID NO: 102 - protein, 220 aa, Homo sapiens
  misc_feature: Incyte ID No: 5510549CD1
MPLQRLDNDVDLRGDQPSLGSFTYSTSAPGPALSPSVPLHYLPHDPLHQELSFGVPYSHMMPRRLSTQRYRLQQPLPPPPPPPPPPPYYPSFLPYFLSMLPMSPTAMGPTISLDLDVDDVEMENYEALLNLAERLGDAKPRGLTKADIEQLPSYRFNPDSHQSEQTLCVVCFSDFEARQLLRVLPCNHEFHTKCVDKWLKANRTCPICRADASEVPREAE

SEQ ID NO: 103 - protein, 608 aa, Homo sapiens
  misc_feature: Incyte ID No: 5544862CD1
MDTEERKDKDSIHGHSQLDKRPEPSTLENITDDKYATVSSPSKSKKLECPSPAEQKPAEHVSLSNPAPLLVSPEVHLTPAVPSLPATVPAWPSEPTTFGPTGVPAPIPVLSVTQTLTTGPDSAVSQAHLTPSPVPVSIQAVNQPLMPLPQTLSLYQDPLYPGFPCNEKGDRAIVPPYSLCQTGEDLPKDKNILRFFFNLGVKAYSCPMWAPHSYLYPLHQAYLAACRMYPKVPVPVYPHNPWFQEAPAAQNESDCTCTDAHFPMQTEASVNGQMPQPEIGPPTFSSPLVIPPSQVSESHGQLSYQADLESETPGQLLHADYEESLSGKNMFPQPSFGPNPFLGPVPIAPPFFPHVWYGYPFQGFIENPVMRQNIVLPSDEKGELDLSLENLDLSKDCGSVSTVDEFPEARGEHVHSLPEASVSSKPDEGRTEQSSQTRKADTALASIPPVAEGKAHPPTQILNRERETVPVELEPKRTIQSLKEKKKKVKDPKTAADVVSPGANSVDSRVQRPKEESSEDENEVSNILRSGRSKQFYNQTYGSRKYKSDWGYSGRGGYQHVRSEESWKGQPSRSRDEGYQYHRNVRGRPFRGDRRRSGMGDGHRGQHT

SEQ ID NO: 104 - protein, 653 aa, Homo sapiens [sequence omitted]

SEQ ID NO: 105 - protein, 154 aa, Homo sapiens
  misc_feature: Incyte ID No: 5850840CD1
MGNCLKSPTSDDISLLHESQSDRASFGEGTEPDQEPPPPYQEQVPVPVYHPTPSQTRLATQLTEEEQIRIAQRIGLIQHLPKGVYDPGRDGSEKKIRECVICMMDFVYGDPIRFLPCMHIYHLDCIDDWLMRSFTCPSCMEPVDAALLSSYETN

SEQ ID NO: 106 - protein, 337 aa, Homo sapiens
  misc_feature: Incyte ID No: 5942936CD1
MKRPCEETTSESDMDETIDVGSENNYSGQSTSSVIRLNSPTTTSQIMARKKRRGIIEKRRRDRINNSLSELRRLVPTAFEKQGSAKLEKAEILQMTVDHLKMLQATGGKGYFDAHALAMDFMSIGFRECLTEVARYLSSVEGLDSSDPLRVRLVSHLSTCATQREAAAMTSSMAHHHHPLHPHHWAAAFHHLPAALLQPNGLHASESTPCRLSTTSEVPPAHGSALLTATFAHADSALRMPSTGSVAPCVPPLSTSLLSLSATVHAAAAAATAAAHSFPLSFAGAFPMLPPNAAAAVAAATAISPPLSVSATSSPQQTSSGTNNKPYRPWGTEVGAF

SEQ ID NO: 107 - protein, 535 aa, Homo sapiens
  misc_feature: Incyte ID No: 5951431CD1
MAAEPNKTEIQTLFKRLRAVPTNKACFDCGAKNPSWASITYGVFLCIDCSGVHRSLGVHLSFIRSTELDSNWNWFQLRCMQVGGNANATAFFRQHGCTANDANTKYNSRAAQMYREKIRQLGSAALARHGTDLWIDNMSSAVPNHSPEKKDSDFFTEHTQPPAWDAPATEPSGTQQPAPSTESSGLAQPEHGPNTDLLGTSPKASLESVYLSAKGALPARELKSSIIGKKKPAAAKKGLGAKKGLGAQKVSSQSFSEIERQAQVAEKLREQQAADAKKQAEESMVASMRLAYQELQIDRKKEEKKLQNLEGKKREQAERLGMGLVSRSSVSHSVLSEMQVIEQETPVSAKSSRSQLDLFDDVGTFASGPPKYKDNPFSLGESFGSRWDTDAAWGMDRVEEKEPEVTISSIRPISERATNRREVESRSSGLESSEARQKFAGAKAISSDMFFGREVDAEYEARSRLQQLSGSSAISSSDLFGDMDGAHGAGSVSLGNVLPTADIAQFKQGVKSVAGKMAVLANGVMNSLQDRYGSY

SEQ ID NO: 108 - DNA, 2173 bp, Homo sapiens
  misc_feature: Incyte ID No: 095210CB1
cggcggccctgtccccgtaactgtgacacgggtgcacgcgagcgtcattgggggcgatgggggccgtgctgggtgcgcgtttgcaccagtgacgcagccgctgcatctccgccagtccgcgcaggccagcatccttcagaaaaagcatccccgaggaggaagacgaatcgttaaacatctgaaagggtcaggccagcatccttcagaaaaagcatccccgaggaggaagacgaatcgttaaacatcttaggtcagctctagcctctcggaatttgtcttcttcagtggaaaccccgagaagactgatcagttcttcagttctaaaacaatggcccagggtttggtgacgttcgccgacgtagccatagacttttctcaggaggagtgggcctgtctgaactctgctcagagggacctgtactgggacgtgatgctggagaactacagtaacttggtctcactggatttggagtcagcatatgaaaataagagtttacctacagaaaaaaacattcatgaaataagggcttccaaaaggaattcagatagaagaagtaaatcccttggccgtaactggatatgtgaaggtacgcttgaaagaccacagcgctccagagggaggtatgtcaatcagatgatcatcaattatgtcaaaaggcctgctactagagaaggcacccctcctagaacacatcagagacatcataaggagaattcctttgaatgtaaggactgtgggaaggcctttagtcgtggctatcaacttagtcaacatcagaaaatccatactggtgagaaaccttatgaatgtaaagaatgtaagaaggccttccgttggggcaatcagcttactcaacatcaaaaaattcatactggggagaagccctacgaatgtaaagactgtgggaaggcttttcgatggggctcaagcctcgttattcataagaggattcatactggtgaaaaaccctatgaatgtaaagactgtggaaaggcctttcggcgtggtgatgagctcactcagcaccagagattccacactggggagaaagactacgaatgcaaagactgtgggaagacctttagccgtgtgtataaacttattcagcacaagagaattcatagtggggagaagccttacgagtgtaaagactgtgggaaggcttttatttgtggttcaagcctcattcagcataaaagaattcacacaggtgagaaaccctatgaatgtcaagaatgtgggaaggcctttactcgagtcaattaccttactcagcatcagaagatccacaccggtgagaagcctcacgaatgtaaggagtgtgggaaggcctttcgctggggttcgagcctcgttaagcacgagaggatacatacgggcgagaagccgtacaagtgcacagaatgtgggaaggccttcaattgtggctatcacctcactcagcacgagagaatccacacaggcgaaaccccgtataaatgtaaggagtgtgggaaggctttcatttatggatcgagcctcgtgaaacatgagagaattcataccggggtgaaaccctatgggtgtacagaatgtgggaagagctttagtcacggccatcagcttacacaacatcagaaaacgcacagtggggcgaaatcctacgaatgtaaggagtgcgggaaggcatgtaaccacctaaaccatctccgagaacatcagaggatccacaacagttgaagagccttttgaacgcagtagcccgctcgtatctatggtttcgctttccacagtttgttacctgcagtcaactgcagttcaaaaatattaaatggaaaattccagaaataaagaattttaagtctcaaatggtgtgcccttctgagtagcgtgatgaaatctctcgctgtccggctccagccggccggggatgtgagtcatcccttggtccagcacatccacgctgtatacgccacccaccctgctagtgacttagtagccgtcttggtgatcagatcaactatcccagcatcacagtgcctgtgcccaagcagtcctcactttgcttaacagtggccccagagagcaggagtagtgatgctggtgattcggatatgccaaagagaagccacaaagtgcttccttttaaatgaaaaggtgaaagttctcaacttaaaaaaaaaaaaaaaaagg

SEQ ID NO: 109 - DNA, 1512 bp, Homo sapiens
  misc_feature: Incyte ID No: 157953CB1
tctgactggatgactgagcgagttgatttcacagctctcctccctctggagcctcccctaccccccggcaccctcccccaaccttccccaaccccacctgacctggaagctatggcctccctcctcaagaaggagctggaacagatggaagacttcttcctagatgccccgctcctcccaccaccctccccgccgccactaccaccaccaccactaccaccagccccctccctccccctgtccctcccctcctttgacctcccccagccccctgtcttggatactctggacttgctggccatctactgccgcaacgaggccgggcaggaggaagtggggatgccgcctctgcccccgccacagcagccccctcctccttctccacctcaaccttctcgcctggccccctacccacatcctgccaccacccgaggggaccgcaagcaaaagaagagagaccagaacaagtcggcggctctgaggtaccgccagcggaagcgggcagagggtgaggccctggagggcgagtgccaggggctggaggcacggaatcgcgagctgaaggaacgggcagagtccgtggagcgcgagatccagtacgtcaaggacctgctcatcgaggtttacaaggcccggagccagaggacccgtagctgctagaagggcaggggtgtggcttctgggggctggtcttcagctctggcgccttcatccccctgcctctaccttcattccaaacccctctcggccgggtgcagtggcttatgcttgtaatcccagcactttgggaggccaaggcaggaggatcgtttgaggccaggaggtcaataccagcctgggcaacatagtaagaccctgtctctattaaaaaaaaaaaatcaacccttcttccccaccaaaccacccaactcctctctactcttatccttttatcctctgtctctgcttatcacctctcttgcgtatttctggatctccttccctcctttctcgtccaaatcatgaaatgtttggccttagtcaatatctatgcccgtcacataacagccgaggcaccgaggcccacagagaagcagctgggagcttggaaacctggtctcttgaatttcaaacctggtttcttacaggtggttgtctggggtgggtggagtggcgacaggatagagctgaaggactatgcaaatgaggaagtaagtcagggcgggctttgagaaggggacccatatcctacaggcaaaaagcaggctaggtgaccttgggacactacgctaagggagggaggctaaaggcggccaggtttgcagtgcgggaagatgagcaggccagtgggaggaggggcagggcagggctgtagttggtgactgggtgttcattttagctctaagaaaaaaaatcagtgtttcgtgaaggtgttggagaggggctgtgtctgggtgagggatggcggggtactgatttttttgggaggttatgagcaaaaataaaacgaaacatttcctctgaaaaaaaaaa

SEQ ID NO: 110 - DNA, 1447 bp, Homo sapiens
  misc_feature: Incyte ID No: 159196CB1
cggctcgagggcggcgctgtccctgatcgagcggcgggagcgagggttcagagatgggcagtgagaaggagcagagtccagaaccacacctgcctgaggaaggggaagggggtaagccttggagagtggatgactcagagggttcttggatcccacctggggagaaggagcatgggcaagagagcctgtcggatgaactgcaagaaactcatccaaaaaagccatggcagaaagtcactgtccgggctcgagagctaggggaccccattgctcatccaaggcatgaggcagatgagaagccctttatatgtgcccagtgtggcaaaaccttcaataatacctccaacctgagaacacaccagcggatccacactggtgagaagccttacaagtgttctgaatgtggcaagagcttctcgagaagctccaaccgcatccggcacgagcggatccacctggaagagaaacactacaaatgccccaagtgccaggagagctttcggcggcgctcagacctcaccacgcaccagcaagatcacctaggcaagcggccataccgctgtgacatctgtggcaagagcttcagccagagtgccacgctagctgtgcatcaccggacccacctggagccagcaccctacatctgctgtgagtgtgggaagagcttcagcaacagctccagctttggcgtgcatcaccgcacccacacaggtgagagaccttatgagtgcactgagtgtgggcggaccttcagcgatatctccaactttggagcacaccagcggacccacagaggggagaagccctaccggtgcactgtgtgtgggaaacacttctcccggagctcgaatctcatccgccaccagaaaactcacttgggcgaacaggctgggaaagattccagctgaaggagagccccatttagagtgagggagagagagtgagagaccctaacctattggaggaagatcttcagcatcttttgctgctaccttgacctcaagcccttcatcccactttggagaatggttttgtatagcctctgaagtcaggatctcaggaagtcctgaggagggactctggaataaaaacccttgcctctttccaggccaatttctcgtgttggaaagtcagaagacccagtcttggctttactttcttggggtgaaagagaaatagggtaggctcagaacatgctcatgttattaaggcagcagtccccctggcctttgaggaagtacttatgagatgggtgtcactgtctgaaggttctccaaattgtctgtgaactgcttaggtaggagtgcactgcagtttcctgctagttcccacctgttgtgccccaactttgcttctagatctctggggtgggaggagtgaccttctcaatggaaggggcctccttggtctggagaagagatctgaggtcccaccttagaaatgaaag

SEQ ID NO: 111 - DNA, 4580 bp, Homo sapiens
  misc_feature: Incyte ID No: 343338CB1
attagaatgctgcataaataaagatgaatgctgtctttttaaacaagatctctgggaaaagtgcattttggtaaagcatgtatgatttttctttgggggatcggattccttttaatacaggtttgtaagtggcagtcgtgatgggacagcacgtatttggcaatttaaacgaagagagtggaagagcattttgttggatatggctactcgtccagcaggccaaaaccttcaaggaatagaagataaaatcacaaaaatgaaggttactatggtagcttgggatcgacatgacaatacagttataactgcagttaataacatgactctgaaagtttggaattcttacactggtcaactaattcatgtcctgatgggtcatgaagatgaggtatttgttcttgaaccacacccgttcgatcctagagttctcttttctgctggtcatgatggaaacgtgatagtgtgggatctggcaagaggagtcaaaatacgatcttatttcaatatgattgaaggccaaggacatggcgcagtatttgactgcaaatgctctcctgatggtcagcattttgcatgcacagactctcatggacatcttttaatttttggctttgggtccagtagcaaatatgacaagatagcagatcagatgttctttcatagtgattatcggccacttattcgtgatgccaacaattttgtattagatgaacagactcagcaagcacctcatcttatgcctcccccttttttggttgatgttgatggtaaccctcatccatcaagatatcaaagattagttcctggccgtgaaaattgcagggaggagcaactcatccctcagatgggagtaacttcctcaggactgaatcaagttttaagtcagcaagcaaaccaggagatcagcccactggacagcatgattcaaagactacaacaggagcaagacctgagacgttctggtgaagcaggtatcagtaataccagccgtttaagtagaggctccataagttctacctcagaggttcattcaccaccaaacgtaggactaagacgtagtggacaaattgaaggtgtacggcaaatgcacagcaacgcaccaagaagtgaaatagccacagagcgggatctggtagcttggagtcgaagggtggtagtacccgagctatcagctggtgtagccagtaggcaagaagaatggagaactgcaaagggagaagaagaaataaagacttacaggtcagaagagaaaagaaaacacttaactgttccaaaagagaataaaatacccactgtctcaaagaatcatgctcatgagcatttcctggatcttggagaatccaaaaagcaacagacaaatcaacacaattatcgtacaagatctgcattggaagagactcctagaccctcagaagagatagaaaatggcagtagttcttcagatgaaggcgaagtagttgctgtcagtggtggaacatccgaagaagaagagagagcatggcacagtgatggcagttctagtgactactccagtgattactctgactggacagcagatgcaggaattaatctgcagccaccaaagaaagttcctaagaataaaaccaagaaagcagaaagcagttcagatgaagaagaagaatctgaaaaacagaagcaaaaacagattaaaaaggaaaagaaaaaagtaaatgaagaaaaagatggaccaatatcaccaaagaaaaagaagcccaaagaaagaaaacaaaagagattggctgtgggagaactaactgaaaatggtttgacattagaagaatggttgccatcaacatggattacagataccattccccgaagatgtccatttgtgccacagatgggtgatgaggtttattatttccgacaaggacatgaagcctatgtcgaaatggcccggaaaaataaaatatatagtatcaatcccaaaaaacaaccatggcataaaatggagctacgggaacaagaacttatgaaaatagttggcataaagtatgaagtgggattacctaccctttgctgccttaaacttgcttttctagatcctgatactggtaaactgactggcggatcatttaccatgaaataccatgatatgcctgacgttatagatttcctagtcttgagacaacaatttgatgacgcaaaatacaggcgatggaatataggtgaccgcttcaggtctgtcatagatgatgcctggtggtttggaacaatcgaaagccaggaacctcttcaacttgagtaccctgatagtctgtttcaatgctacaatgtttgctgggacaatggagatacagaaaaggtgagtccttgggatatggagcttatacctaataatgctgtatttcctgaagaactaggtaccagtgttcctttaactgatggtgagtgcagatcactaatctataaacctcttgatggagaatggggtaccaaccccagggatgaagaatgtgaaagaattgtggcaggaataaaccagttgatgacactagatattgcctcagcatttgtggcccccgtggatctgcaagcctatcccatgtattgcacagtagtggcatatccaacggatctaagtacaattaaacaaagactggaaaacaggttttacaggcgggtttcttccctaatgtgggaagttcgatatatagagcataatacacgaacatttaatgagcctggaagccctattgtgaaatctgctaaattcgtgactgatcttcttctacattttataaaggatcagacttgttataacataattccactttataattcaatgaagaagaaagttttgtctgattctgaggatgaagagaaagatgctaatgtgccaggaacttctactcgaaaaaggaaggaccatcagcctagaagaagattacgtaatagagcccagtcttacgatattcaagcatggaagaaacagtgtgaagaattgttaaatctcatatttcaatgtgaagattcagagcctttccgtcagccggtagatctccttgaatatccagactacagagacatcattgacactccaatggattttgctaccgttagagaaactttagaggctgggaattatgagtcaccaatggagttatgtaaagatgtcagacttattttcagtaattccaaagcatatacaccaagcaaaagatcaaggatttacagcatgagtttgcgcttgtctgcattctttgaagaacacattagttcagttttatcagattataaatctgctcttcgttttcataaaagaaataccataaccaaaaggaggaagaaaagaaacagaagcagctctgtttccagtagtgctgcatcaagccctgaaaggaaaaaaaggatcttaaaaccccagctaaaatcagaaagctctacctctgcattctctacacctacacgatcaataccgccaagacacaatgctgctcagataaacggtaaaacagaatctagttctgtggttcgaaccagaagcaaccgagtggttgtagatccagttgtcactgagcaaccatctacttcttcagctgcaaagacttttattacaaaagctaatgcatctgcaataccagggaaaacaatactagagaattctgtgaaacattccaaagctttgaatactctttccagtcctggtcaatccagttttagtcatggcactaggaataattctgcaaaagaaaacatggaaaaggaaaagccagtcaaacgtaaaatgaagtcatctgtactcccaaaggcgtccactctttcaaagtcatcagctgtcattgagcaaggagattgtaagaacaacgctcttgtaccaggaaccattcaagtaaatggccatggaggacagccatcaaaacttgtgaagaggggacctggaaggaaacctaaagtagaagttaataccaatagtggtgaaattatacacaagaaaaggggtagaaagcccaaaaagctacagtatgcaaagccagaagatttagagcaaaataatgtgcatcccatcagagatgaagtacttccttcttcaacatgcaattttctttctgaaactaataatgtaaaggaagatttgttacagaaaaagaatcgtggaggtaggaagcccaaaaggaagatgaagacacaaaaattagatgcagatctcctagtccctgcaagtgtcaaagtgttaaggagaagtaaccgaaaaaagatagatgatcctatagatgaggaagaagagtttgaagaactcaaaggctctgaaccccacatgagaactagaaatcaaggtcgaaggacagctttctataatgaggatgactctgaagaggagcaaaggcagctgttgttcgaagacacctctttaacttttggaacttctagtagaggacgagtccgaaagttgactgaaaaagcaaaagctaatttaattggttggtaacttgtaccaaaatattttacttcaaaatctataaagcaggtacagttaaggaataagtagaactaaggcttctgcttccttgctgctgtggtggagtagggaatgttatgatttgatttgcaaaaaaaaa

SEQ ID NO: 112 - DNA, 2181 bp, Homo sapiens
  misc_feature: Incyte ID No: 402386CB1
cgtgctggcttaactatgcggcatcagagcagattgtactgagagtgcaccatatgcggtgtgaaataccgcacagatgcgtaaggagaaaataccgcatcaggcgccattcgccattcagcgtgcgcaactgttgggaagggcgatcggtgcgggcctcttcgctattacgccagctggcgaaagggggatgtgctgcaaggcgattaagttgggtaacgccagggttttcccagtcacgacgttgtaaaacgacggccagtgccaagatacggctgattctgtcgtgtgggacctgttctggctgctccagccccaggaaggacccaggacacccggaagccggaaatggactcagtggcctttgaggatgtggccgtgaacttcacccaggaggagtgggctttgctgagtccttcccagaagaatctctacagagatgtgacgctggaaaccttcaggaacctggcctcggtcggaatccaatggaaagaccaggacattgagaatctgtaccaaaacctggggattaagctaagaagtctggtggagagactctgtggacgtaaagaagggaatgaacacagagaaactttcagccagattcctgattgtcacctgaacaagaaaagtcaaactggagtgaaaccatgcaaatgcagcgtgtgtgggaaagtcttcctccgtcattcattcctggacaggcacatgagagctcatgctggacacaaacgatctgagtgtggtggggaatggagagagacgccccgtaaacagaaacaacatgggaaagcctccatttcccccagtagtggtgcacggcgcacagtaacaccaactcgaaagagaccttatgaatgcaaggtgtgcgggaaagcctttaattctcccaatttatttcaaatccatcaaagaactcacactggaaagaggtcctataaatgtagggaaatagtgagagccttcacagtttccagtttctttcgaaaacatggaaaaatgcatactggagaaaaacgctatgaatgtaaatactgtggaaaacctatcgattatcccagtttatttcaaattcatgttagaactcacgctggagaaaaaccttacaaatgtaaacaatgtggtaaagccttcatttccgcaggttaccttcggacacatgaaatcagatctcacgcgctggagaaatcccaccaatgtcaggaatgtgggaaaaaactcagttgttccagttcccttcacagacatgaaagaactcatagtggaggaaaactctacgaatgtcaaaaatgtgccaaagtctttagatgtcccacgtcccttcaagcacatgaaagagctcacactggagaaagaccttatgaatgtaataaatgtggtaaaaccttcaattatcccagttgttttcgaagacataaaaaaactcatagtggagaaaagccatatgaatgtacaaggtgtggtaaagcctttgggtggtgcagttccctccgaagacatgaaatgactcacactggagaaaaaccctttgattgtaaacagtgtggtaaagtctttactttttcaaattaccttagcctcctacaggcgcgtgccgacatgcctggctggttttttgtattttggtagagacggggtttcattgtactggccaggatggtcttgatttcctgaccttgtgatccaccccaccttggcctcccagggtgctgagattacaggagtgagccactgcgaccggcccatgagtctttattaatagagatttcttactggtgttatgtggcagattctgcatattcctcacccatcatatgtattccactttcctttattatggggaaaactactctttttggcatgatacaatgttgactccattttctttgctaataaggacttggtatcaatttatcagtatgtaaagtttaccatagagtattgtctcatgtgaatcattcccattttttgctctttactctttgtcgttatttctgagtattatttggatggttcattttgacttaaggatagccctgtgatatgacaatatttttatctaatctgatggagaaagcatttagtctcctgatcaagtatgatgttagctgcaggtttttaataaatgccttaattcagtttaaaaaaaaaaaaaaaaaaaaaaaaaaaaaaaaaaaaaaa

SEQ ID NO: 113 - DNA, 2400 bp, Homo sapiens
  misc_feature: Incyte ID No: 456487CB1
gacagtagaggcgccccatggggaacatactgacctgtcgtgtgcaccctagcgtcagcctcgagtttgaccagcagcaggggtcggtgtgtccctctgaatctgagatctatgaggcaggagctggggacaggatggcaggagcgcccatggctgctgctgtacagcctgctgaggtgactgttgaagttggtgaggacctccacatgcaccacgttcgtgaccgggagatgcctgaagctttggagtttaacctttctgccaatccagaggcaagcacaatattccagaggaactctcaaacagatgctttggagtttaacccttctgccaatccagaggcaagcacaatattccagaggaactctcaaacagatgttgtagaaataaggagaagcaactgtacaaaccatgtatctactgtgcgtttcagtcaacaatacagcttgtgttcgacaatattccttgatgacagcacagccatccagcattatcttacaatgacaataatatctgtgaccttggagatacctcatcatatcacacaaagagatgcagatagatctttgagcatacctgatgaacagttacactcatttgcggtttccaccgtgcacattatgaagaaaagaaatggaggtgggagtttaaataactattcctcctccattccatcgactcccagcaccagccaggaggaccctcagttcagtgttcctcccactgccaacacacccacgcccgtttgcaagcggtccatgcgctggtccaacctgtttacatctgagaaagggagtgacccagacaaagagaggaaagccccggagaatcatgctgacaccatcgggagcggtagagccatccccattaaacagggcatgctcttaaagcgaagtgggaaatggctgaagacatggaaaaagaaatacgtcaccctgtgttccaatggcatgctcacctattattcaagcttaggtgattatatgaagaatattcataaaaaagagattgaccttcagacatctaccatcaaagtcccaggaaagtggccatccctagccacatcggcctgcacacccatctccagctctaaaagcaatggcctatccaaggacatggacaccgggctgggtgactccatatgcttcagccccagtatctccagcaccaccagccccaagctcaacccgcccccctctcctcatgctaataaaaagaaacacctaaagaagaaaagcaccaacaactttatgattgtgtctgccactggccaaacatggcactttgaagccacgacgtatgaggagcgggatgcctgggtccaagccatccagagccagatcctggccagcctgcagtcatgcgagagcagtaaaagcaagtcccagctgaccagccagagcgaggccatggccctgcagtcgatccaaaacatgcgtgggaacgcccactgtgtggactgtgagacccagaatcctaagtgggccagtttgaacttgggagtcctcatgtgtattgaatgctcaggaatccaccgcagtcttggcacccgcctttcccgtgtgcgatctctggagctggatgactggccagttgagctcaggaaggttatgtcatctattggcaatgacctagccaacagcatctgggaagggagcagccaggggcagacaaaaccctcagaaaagtccacgagggaagagaaggaacggtggatccgttccaaatatgaggagaagctctttctggccccactaccctgcactgagctgtccctgggccagcagctgctgcgggccaccgctgatgaggacctgcagacagccatcctgctgctggcacatggctcccgtgaggaggtgaacgagacctgtggggagggagacggctgcacggcgctccatctggcctgccgcaaggggaatgtggtcctggcgcagctcctgatctggtacggggtggacgtcatggcccgagatgcccacgggaacacagcgctgacctacgcccggcaggcctccagccaggagtgcatcaacgtgcttctgcagtacggctgccccgacaagtgtgtgtagtatctgttttatttgactgcagtctccttggtgcaaaaacaaaatgggaaaaataaggataactcagaatttcaaaaggaaatcacaaattcagctaataatagcattttcagtacttttcgtaaactaagtaaatacacaaaatgttgatttttctgaccataagacgtattttatgtccttttgccaaggtggatttgttagtctcaggccctcctggccacattgcccaagtcacacaggcttctgtattatgtatttagataaaatgtgtgaaaatatatttgaaataaagttcataaatatgcaaaaaaaaaaaaaa

SEQ ID NO: 114 - DNA, 1440 bp, Homo sapiens
  misc_feature: Incyte ID No: 490256CB1
cgctagctgttgcacctgttcctccctgcgcgtaagatagaggataaatctcctggcaaagcccagaatgaccacagccctggaacctgaggaccaaaaaggacttctgataattaaggcagaggaccattactggggacaggattccagctcacaaaagtgcagtcctcacaggagggaactctatagacaacacttcaggaagctctgctatcaggatgcacctggaccccgtgaagctcttacccagctgtgggagctctgccgtcagtggctgaggccagaatgccacaccaaggagcagattttagacctgctggtgctagaacagtccctgagcattcttcctaaagacctgcaagcatgggtgcgtgcacaccatccagagactggagaggaggcagtgacggtactggaggatctggagagagagcttgatgaacctggaaagcaggtcccaggcaattcagaaagacgggacatactcatggacaagttggcccccttgggaaggccatatgaatcactgactgtccagctccatcccaaaaagacccagctggagcaggaagctgggaaaccacaaaggaatggtgataaaactaggactaagaatgaagagttgttccagaaggaagatatgcccaaagacaaggaattccttggggagataaatgacagactgaacaaagatactcctcagcatcctaagtccaaagatattattgaaaatgagggcagatcagaatggcaacagagggaaagaagacgatataaatgtgatgaatgtgggaaaagtttcagtcatagctcagaccttagtaaacacaggagaactcacacgggagagaagccctataaatgtgatgagtgtggaaaagccttcattcagcgctcacatctcattggacatcatagagtacacacgggagtaaaaccctataaatgtaaagaatgtgggaaagacttcagtgggcgcacaggtcttattcagcatcagagaatccacacaggtgaaaaaccctatgaatgtgatgagtgtggaaggcctttccgagtaagttcagctcttattagacatcaaagaattcataccgcaaataaactctactaatatagcagtaatatcaaaagttctttggacactcaggcctaactagttatcaaagaatctattttagaaaccttgagtttcctcaatgtggtcaaagcttcagtcatcattaaacttctctggaccaaagaaaaaaaaaaaaaaaaaaaaagggggggccgctctaggggtcccaagtttaggaacgggggcatgggaggtcaaagctcttcaaaagggcccccaaatttcaattcagtggcggtcgttttaaaaggtcgggatggggaaaacccgggggttccccaatttaatccctttgcagcattccagaaaagtaacttggg

SEQ ID NO: 115 - DNA, 2238 bp, Homo sapiens
  misc_feature: Incyte ID No: 494740CB1
  unsure 10, 49, 60, 127: a, t, c, g, or other
gggggccagntcctcctccgagttccttaatccggggccgtcaattaanatccggggccntcattcacatccgggaaccctcatccggggctttctcacccacatccgggaccctcatgcctgggcngaagaagggggggccctcattcgggaccctgcactccgtcgccggaagtgccaccgagaagcgccggcctcggggctgtctacagcggcccgggagaggctgtggtggccccgagcgcgagtgtgtaggtgacaggacagcggccaggcccgcccctcccctcggtgagtacccggaagccgttttggggtcgcagcggggtggcagcttgttttgccttcacgggagtagaaggaggcggcgtccggccgcggccgacggtagttcgcttccccgagagtgcgcggaggcccgggtgcgaggagggcctgtttctcttcagccctggttcattcacctcgcggaccgagggccccgccgtcaggagccggcgaccgtgccctggtgcgagctgtgatggtcattgtcctccagagcagtgatggaggaaataccagcccaggaagcagcagggtcaccaagggtccagtttcagtctttggagacccagtctgagtgtctgtccccagagcctcagtttgtgcaggacaccgacatggaacagggactcactggggctccacctgttcctcaggtgcctgctcttccccgtgaggcaagcccaggagaccaggcagctgcgctcttgacagccaggtaccaggagtttgtgacattcgaggatgtggctgtgcaccttactcgagaggaatggggatacctggaccctgttcagagggacctctacagagaagtgatgttagagaattatgggaacgtggtctcactgggcatacttctccgccttcccaccacccggattcatagtgtgaattcctgcccggccctgagtcatacccaggcaagtgctttctctggagaaacacttgccgtccttacagcaggaatctccaagagatggcccaagtatcggcttcccatcgatattgctcgtccctgctcggaaactccttttccacgattgtgagatattaaaattgactgatggaatagaagctccccaggatgccaccactgtgtaaaatcgcagctcctcaaattacctctgtttaatttcaaatgttagggtccaaggaagccctctgttgcaaccagatatgttttgaacccagttcattcagaaaccatggttggtggtcatcatctacttgtattgtgaaaaaccagaaattccaaattcagctcttcagttatggtcttttcatattattttagaatgtgaaacttatgctgtgtgcccctccttttatgtggcgaacacaacctgccccgtatggtgcctaactctcctgtgaaccctgggcttccctcatgtttaacattctggtttcctccttccttgaagtccctgtggccctcttcaaggtcctaccttcctaccctttattctttgtggttctgtacagattgatgcaattatattgcctttcctgattaagtgttccttactctgtccttgatggaggggagaagggagggcaaagaagttaaatttatttcagggcatcaaattgaatatctacttaataactttgtaaactgtaaagtgacatacatataattgtaaagtactgttaattttatctaataattacagagtttccaacagttaacctgtctactttttggagtaaagaaactttgtagcagtttaatgcagtctaatagcatagtatgctatagactgaactttatcccatttcctctcttatctctgcactgcacactcgacatgcagtcgacatgcatacacacttttacacatacaagagacacgcacagtgcaagaaagccttctactcatcttgcttttgtgatcaagttagcagcatctccttagcagttatttttacaatccttgggaaatcattttcatatttttgggttcagcagacttcatctgaaaattaacccatttatgcctagtgttccattattggaacactaagcttgcgggaattatttatgtcctgctgctcaaggtcatcgccaaggtctgatttttaacaaaaattgcaacctccagcataactgggttaagtttatacatttattaatttaactttttagggttgtaagacttttttttttttttgacgctccatacccag

SEQ ID NO: 116 - DNA, 873 bp, Homo sapiens
  misc_feature: Incyte ID No: 507475CB1
cgccgcgggcgccagagctggcgctctagcccacggagttggttaactcctctcaccggcccctggaaagggttccaagtcctttagtacccgacgctgtctgggaattccgggcgtttcggctccttggtcgcagaggcaggagggcgtgcgtggcaggagggttcgggttatatactcctaggtcctgggacagaatagttacgacctctgggacaggaactcttctctcttttgttaataaacttccaactccctcctcagacccgaccgcatgtctgtcatggacctcgccaatacttgctccagctttcagtcggacctggatttctgttcagattgcggctcggtcctgcctctgcccggggctcaggatacggtcacctgtattcgctgtggcttcaacatcaacgttcgggactttgaggggaaggttgtgaagacttcggttgtgttccaccaactggggacagccatgcctatgtcggtggaggaagggcctgagtgccagggacctgtggttgacaggcgctgccctcgatgtggtcatgaaggaatggcataccacaccagacagatgcgttcagccgatgaagggcaaactgtcttctacacctgtaccaactgcaagttccaggagaaggaagactcttgacctttttcctgggcaactctacagtccctccctcctttcggaaggtgaaggatactgggtttttagatgccttgtccatcctgtctggttgcaatgttttgctcccagaagagaatcagatcatcatgtggggattaccattgttcctggagtactcctacccttagttgaatttccttattaaagttatatttttctataagaccctgaaaaaaaaa

SEQ ID NO: 117 - DNA, 2826 bp, Homo sapiens
  misc_feature: Incyte ID No: 531581CB1
ccaagatggcggagacagagtgaagaaactgtgttccccccttgggttgctatcgatcaagggtaaaattccattctgatatcaaaatgcagtattcgcaccactgtgagcaccttttagagagactgaacaaacagcgggaagcaggttttctctgtgactgtaccatagtgattggggaattccagtttaaagctcataggaatgtgctggcctcctttagtgagtattttggtgcgatctacagaagcacttctgagaacaatgtctttcttgatcagagtcaggtgaaggctgatggatttcagaaactgttggagtttatatacacaggaactttaaatcttgacagttggaatgttaaagaaattcatcaggctgctgactatctcaaagtggaagaggtggtcactaaatgcaaaataaagatggaagattttgcttttattgctaatccttcttctacagagatatctagtattactggaaacattgaattgaatcaacagacttgtcttcttactctgcgagattataataatcgagagaaatcagaagtatctacagatttgattcaggcaaatcctaaacaaggcgcgttagcgaaaaagtcatctcaaacgaaaaagaagaagaaggctttcaactccccgaaaacagggcagaataaaacagtgcaatatcccagtgacatcttagagaatgcatctgttgaattattcctagatgcaaataaactgcccacacctgtagtagaacaagttgcacaaataaatgataattcagaactcgagttgacatcagttgtggaaaatacttttccagcacaagatattgtgcacactgttacagtgaaacggaaacgtggaaaatcacagccaaactgtgctctgaaagaacactctatgtctaatatagccagcgtcaagagtccttatgaggcggagaactccggggaagagctggatcagaggtattccaaggccaagccaatgtgtaacacatgtgggaaagtgttttcagaagccagcagtttgagaaggcacatgagaatacataaaggagtcaaaccttacgtctgccacttatgtggaaaggcatttacccaatgtaaccagctgaaaacgcatgtaagaactcatacaggtgagaagccatacaaatgtgaattgtgtgataaaggatttgctcagaaatgtcagctagtcttccatagtcgcatgcatcatggtgaagaaaaaccctataaatgtgatgtatgcaacttacagtttgcaacttctagcaatctcaagattcatgcaaggaagcatagtggagagaagccatatgtctgtgataggtgtggacagagatttgctcaagccagcacactgacctatcatgtccgtaggcatactggagaaaagccttatgtatgtgatacctgtgggaaggcatttgctgtctctagttctcttatcactcattctcgaaaacatacaggtgaaaaaccatacatatgtggtatttgtgggaaaagttttatttcctcaggagagctcaacaaacactttcggtcccatacaggagaaagaccatttatctgcgaattatgtggaaattcttacacagatattaaaaatttaaagaagcacaaaacaaaagtccattctggtgcagataaaactctagactccagtgcagaggatcatactttgagtgaacaggattccatacaaaaaagtcctttatcagaaactatggatgtgaagccttctgatatgactttaccattagctcttccacttgggactgaggaccatcacatgcttctgcctgtcacggatactcagtctcctacatcagatacattgttgaggtcaactgtgaatgggtattcagaaccacagttgatttttttacaacaattatactgactttgtaaggaatatggaattgctaagatatcattggtagcaaacatctctggtaaggtgcatatattcatattaaattcccattcatttgagttgtgaccattatttttcattcactgaagtaaaagcacctgatgctgcatcacaactgcaatgtttgtttttatttttggctttatgtctatactccacagagagctttttaagtaatgaattatgtagcactattttgggtggatgagttttattttcttttaaagctgccttaattccatttttattttgcattttagaattgcccttcatttactaaatcagccagttaatgtgattcagttgtgacctgtgggattttaaaattttcctgccctcataatttaagcaaaatccacgatagtatcagcccaagagtgtgttgctatttgtaagccccatggatcaatacataaactatgcataaaaataaaatttcatattttcgctcgtaaaaatttaggcgctgaataagaattgtgctatttctctattaatatattgttagaaataacttttctaatgaaacaaaaatgtttctcaaaatctagaaaagtgcatataaatttttgttcatttagaactgagtattctggagaaaaccaatggtcagcacttttggtttgagttatctgagattgtattttcaaaatgaattttaagtagatatttggtgtttttatcttgtcaaagacagtttcaaaatttgattcagtttatgttttattccgttctaaaatattggagatgaggaaaatgtacttgagttttgaaatattttggtaagcctctcttactcctgttatgcactttttaaaataaatactgaattccagaaagaattttctagatataaacttaatgcatactagaa

SEQ ID NO: 118 - DNA, 859 bp, Homo sapiens
  misc_feature: Incyte ID No: 675190CB1
cggctcgaggcagtggagacaggtcatcggtctgttgagcatttttgtcatctgcaaataattttagccaggtggcaagtgtatggactgtggagtaagaagtacctgcctctgcctctgacttgggttctggcctataggaacaagacattttcagtaatggaagaaggagcttccaggctggggaagatcatcatttccagtggtagcttgacctgagatgatacctgaccaccacttctgggaaggcccagaatagacagaagagagagaacatactagagttgctagcccctaagagttgaacgaaatgggcaaggcccagctgaaataacaggaaacacatgaaaaatgccacgattgtaatgtctgtgaggagagagcaaggcagttcttcaggggaggggtcattgtcattcgaagatgtggctgtgggcttcaccagggaggagtggcagtttttggaccagtctcagaaggtcttgtacaaggaagtaatgttggagaactacatcaacctagtatcaatagggtatcgaggcaccaagccagattcgctcttcaagttggagcaaggagaacccccagggatagcagaaggagcagcccacagtcaaatctgtccagggtattcattcaggagaaggaccctacagatggagggaatgcaggaaagctaagaagaatcacacctcattgcagatctgcattaccgttggaaaacagcagcctcagaaccacagtagccatgaagaccatcagccttcaaccaccacccttgtatcagaggagacaaataagcttggaaatcctcaaaaagcctcatcctcagagcaatgtcattatatatcttgtcttc

SEQ ID NO: 119 - DNA, 1652 bp, Homo sapiens
  misc_feature: Incyte ID No: 685434CB1
ttatgtcatgtctggtagtttatactttaagtaatatgctatctgaacccggctatgtacattgaggcatattttaatacactcagactacaaattacaacaacatgcaataaataggacaccaacaaaaagtcagcacaaagtgaactttactgagtattataatcagctctttggaatgccagtttttcatagtgatattaagatatggttgttaaattagatcacaaaaattgcttttcttttaaatagaaaatgttatcaatcacacggatgaagaaggatttactcctctgatgtgggctgcagcacacgggcaaatagctgtggtagagttcctacttcagaatgtaaggaaaatgcctcagaaaatgtatatgtatagttacttaagttaagtctttagtagagtttttatatatccagccagctagatataatggtagaggctaccaaaaaaagtttaatgcttttcatattcttgtggaacttggatctagttgggaaggcaagactaatcatacatgcaacagtgagaaataatttaacgcccagacccctctacatcccacgggaacagaagtactgtcagctttgaaggagaaggcttcatggaggagctgtgacttgactccagagtgaaaggataattaggattgatacaggacggaggaaggaaggcatccaggcaatctcaataaaagttggctgctcagggagagatgctctatctggctactcgtatcgaacaagaaaatgttatcaatcacacggatgaagaaggatttactcctctgatgtgggctgcagcacacgggcaaatagctgtggtagagttcctacttcagaatggtgctgatccccaacttttaggaaaaggtcgagaaagtgcactgtcgttggcctgtagtaaaggctacacagatattgtcaaaatgctgcttgattgtggagttgatgtaaatgaatatgattggaatggaggaacacctctgctttatgctgtacatggaaatcatgtgaaatgtgtaaagatgctcttagaaagtggggctgatccaacaattgaaactgactctggatataattctatggatctagctgtagccctaggctatagaagtgttcaacaggttattgagtcacatttgttgaagctgcttcaaaatatcaaggagtagacacagtcatcagaaaatgtctgcccttttgtttacttcttggtccttataaatgatagttttgtttacttataaatttttacctcagttgcaatatttactggtttttagtaggttttaataaatatttctctgagtaattcactggtttataataaatgtaatactctttttataactatgttttactgtatatttaaaattataaattaatgttttcgtggcatgtaaatttttatggtacagatagttatcatcagtctttgtatcaagtgctgtaatttgacattttcagaaattattctaccctagtcatcttcactcgtgtattaagtcattcactttatatagggtttgctataaatccctagaaaaaaattgttcttattgttgaataaaaaagtgcacagtgtgattgtttacaaaatgatattataaataaataaaatacttcttctgtcaaaaaaaaaa

SEQ ID NO: 120 - DNA, 1612 bp, Homo sapiens
  misc_feature: Incyte ID No: 788663CB1
gaggcctcacggagctcgtagtttcccggacgggccgctcccggcctcgcggcctcgcctccccacactacaactcccacggggcagcgggcgcggctccccgtacccaccagctggccgggcagggcagccacttcgcggtcgggcccgccggctgcgggcacccgcgcgacgggcgggaagatggcggacgtggtcgtgggtaaagacaagggcggggagcagcggctcatctcgctgcctctatcccgcatccgggtcatcatgaagagctcccccgaggtgtccagcatcaaccaggaggcgttggtgctcacggccaaggccacggagctctttgttcaatgcctagccacctattcctacagacacggcagtggaaaggaaaagaaagtactgacttacagtgatttagcaaacactgcacagcaatcagaaacttttcagtttcttgcagatatattaccaaagaagattttagctagtaaatacctgaaaatgcttaaagaggaaaagagggaagaagatgaggagaatgacaatgataatgaaagtgaccatgatgaagctgactcctaaaccaaaagtgctttaaaaaccagcctggcgaggacagccctggacccactccactgtctctaagtaaacacagcactgcccgcttttagcgtcttcacttcttcacagagttccagtgtgtggtattctttcgaggtattctttccaggccgagattgagcacctcatgtacctacgccacagacagccagagggaaagcgacccagacagcagcccctcctcgacaggcccaccctgcagctcaggcaccaagaaaacagccgatactggcagccattgcagctccaaactgcagaggcaaggccaattttaacttttcaatttacagtcgattttgaagagcttctacatatcggttatgtaaattcatatatgtatttttggaatcagttcttataaacagctcgattcagttttagctaaatttatagtttaggtagtatgttacatttgaatttttgtcttaagaaaagttgactgttcagatatttttctactgtaaagaaatatacttttctattaaagatctgtacatatttttacagtaaaatgctttatggaactagttttagagccctctatggctttaaggccttgcttactgcctgcaaattttgagaaatttaaaaataagcattctaacacttttattcccacagaaaaattccaagtcaaattatcaaatcaaacacaaaaataagtcttacctcttgtataagcatgttgtactaaaaaaaaattttgaaacattttgtatattggagatctctctcatcttactgttctttgctttaaattcctggcacttctttttactgtctataagagaaaacctatcataagcccaattttttttttccacttagggtaaatgtttggctcttctcatttcattatcttttttttttttttttaaagacagattctcactcagttgcccaggctggattgcggtggcgctgtctcagctcactgcaacctccgcctcccaggttcaagtgattctcctgcctcatcctcctgagtagctgg

SEQ ID NO: 121 - DNA, 1975 bp, Homo sapiens
  misc_feature: Incyte ID No: 870100CB1
gccggaggcgcgtcgggctggagccggtcacgatgccccgaaggaagcaaagccacccgcagcccgtgaaatgcgagggggtcaaagtggatactgaagactccctcgacgaaggacccggggccctggtattggagagtgatttgctactaggccaggatctggagtttgaggaggaagaggaagaggaggaaggcgacggcaacagtgaccagctcatgggcttcgagagagactcggaaggagactctctgggggccaggcctgggcttccctatgggctgagcgacgatgagtctgggggcggccgggcactaagtgcggagagtgaagttgaggagccagccaggggtccaggggaggccaggggtgagaggccaggcccagcctgccagctgtgtggggggccgacaggtgaggggccgtgttgtggggcaggagggccgggtggggggcccctgctgcccccacggctactgtactcatgccgcctctgcaccttcgtgtcccactactcgagccacctgaagcggcacatgcagacacacagcggagagaagccgttccgctgtggccgctgcccctacgcctcagcccagctcgtcaacctgacacgacatacccgcacccacactggcgagaagccctaccgctgtccccactgcccctttgcctgcagcagcctgggcaacctgaggcggcatcagcgtacccacgcagggccccccactcctccctgcccgacctgtggcttccgctgctgtactccacgaccagcccggcctcccagtcccacagagcaggagggggcggtgccccggcgacctgaagatgctctgctccttccagatttgagcctccatgtgccaccaggtggtgccagtttcctgccagactgtgggcagctgcggggtgaaggggagggcctctgcgggactggatcagaaccactgccagagctgctattcccttggacctgccggggctgtggacaagagctggaggagggtgagggtagtcggctgggagctgccatgtgtgggcgctgcatgcgaggagaggctggagggggtgccagtggggggccccagggccccagtgacaaaggctttgcctgtagcctctgcccctttgccactcactatcccaaccacctggcccggcacatgaagacacacagtggtgagaagcccttccgctgcgcccgctgtccttatgcctctgctcatctggataacctgaaacggcaccagcgcgtccatacaggagagaagccctacaagtgccccctctgcccttatgcctgtggcaatctggccaacctcaagcgtcatggtcgcatccactctggtgacaaaccttttcggtgtagcctttgcaactacagctgcaaccagagcatgaacctcaaacgtcacatgctgcggcacacaggcgagaagcccttccgctgtgccacctgcgcctataccacgggccactgggacaactacaagcgccaccagaaggtgcatggccacggtggggcaggagggcctggtctctctgcctctgagggctgggccccacctcatagcccaccctctgttttgagctctcggggcccaccagccctggggactgctggcagccgggctgtccacacagactcatcctgaactaggtccttcttccccatgttttatacagacggaccagaagccacctttttctcccccgctggccaggggctccacacagactaacgtaggcactataaggaccagcccaaccccatgggcgggggggcccatatggaccaggggaccttgccttgactgaggcacttcacgagctcagtgagaagggccctgtattcacctccactgcccccaggggctgtggacaaaccggctgggggactgcccagcctcccacctgtttatttaacttatttcagtgctttataataaaggaaacactaacaaaaaaaaaa

SEQ ID NO: 122 - DNA, 5980 bp, Homo sapiens
  misc_feature: Incyte ID No: 879500CB1
tctgggcttccagctgtgttgaatccacgccccacgttaacccctggccggctacccacacctactctgggtactgctcgagcccccatgcccacacccactctggtgaggcctcttctcaagctggtccacagtccttcacctgaagtcagtgcttcagcccccggagctgcccccttgaccatctcttctcctctccacgtgccatcctcactccctgggccagcctcttctccaatgccaattcccaactcctctccccttgctagtcctgtgtcctctacagtctcagttccattgtcatcttcactccccatctctgtccccaccacacttcctgccccagcctcggctccactcaccatccccatctcagcccccttgactgtttctgcttcgggcccagctctgttgaccagtgtgactccaccattggcacctgttgtcccagcggctcctggacctccctccttggcaccatctggtgcttccccgtcagcatcagccttgactctaggtttggccacagctccatccctgtcttcatctcagacacctggtcaccctctgttgttggctcccacctcttcacatgttccagggttgaactcaaccgtggccccagcatgctcacctgtcctggtgccagcttcggctctggccagtccttttccgtcagcaccaaatccagctcctcctctggctcctcttccggtcctggcaccatcgccaggtgctgctcctgtcctggcttcatcacagactccggttccagttatggctccatcgtctactccaggaacctctttagcctcagcttcaccggtaccagctccaacccctgtgttggctccatcatcaactcaaactatgctaccagccccggttccgtcacctctcccgagcccggcttctacgcagacactggccctagccccagctttagcacccactcttggaggctcatctccatctcagacactctctttgggaacggggaacccccagggaccctttccaactcagacattgtcattaactccagcatcatccctggtaccaactccagcccagacactgtctttggcaccaggaccaccactgggtccaactcagacgctgtctctggctccagcaccccctctggctccagcttctccagtgggcccagccccagctcacacgctgactttggctccagcatcgtcatctgcttcactcctggccccagcttcagtgcagacactgaccttgagccctgccccagttcctaccctgggcccggccgcagctcagaccttggcgctggccccagcctccacacagtccccagcttcccaggcatcttcccttgtggtttcggcatctggtgccgctcccttgcctgtcaccatggtatcccggctgcctgtttccaaggatgagcctgacacactgacattgcgctctggtccccccagccctccctccactgctacctcgtttggtggcccccggcctcgacgccagccccccccaccacctcgttcccctttttatctggactccctggaggaaaagcggaagcggcagcggtctgaacgcctggaacggattttccaacttagtgaggctcatggggccctggcacctgtgtatgggactgaagtcctggatttctgtaccctgccccaacctgttgccagccccatcggccctcgttctcctggccccagccaccccaccttttggacttataccgaggctgcccaccgggctgtactgtttccccagcagcgactagaccagctgtcagaaatcattgagaggttcatctttgtcatgcctcctgtggaggcacctcccccttccctgcatgcctgccacccacctccttggctggccccacgtcaggcagccttccaggagcaattggcctctgagctctggccccgggctcgtcctttgcaccgtattgtgtgtaacatgcgcacccagttccctgacttaagactcatccagtatgattgcggaaagttgcagacgttggcagtgctgttgcggcagctcaaggcagagggccaccgagtgctcatcttcacccagatgacccgaatgctggatgtattggagcagtttctcacctaccatggccatctctacctgcgcctggatggatctactagagttgaacagagacaggccttgatggaacggttcaatgcagacaaacgcatattctgcttcatcctttcaactcggagtgggggtgtgggcgtgaacctgacaggagcagacactgttgttttttatgacagcgactggaatcccaccatggatgctcaggcccaggaccgctgtcaccgaattggccagacccgggatgtccacatatataggcttatcagtgaacggacagtggaggagaacatcctaaaaaaggcaaatcagaagagaatgttgggggacatggccattgagggaggcaacttcaccacagcctatttcaaacagaccatccgagagctgtttgatatgcccctggaggaaccttctagctcatccgtgccctctgcccctgaagaggaggaagagactgtggccagcaagcagactcatattctggagcaggcattgtgtcgggcagaagatgaagaggatatccgtgcagccacccaggccaaggctgaacaggtggctgagcttgcagaatttaatgagaacgatgggtttcctgctggtgagggagaggaagctggccggcctggggctgaggatgaggagatgtcccgggctgagcaggaaattgctgccctcgtagaacagctgacccccattgagcgctatgccatgaaattcctggaggcctcactggaggaggtgagccgagaggagctcaaacaggcagaagagcaagtggaagctgcccgcaaagacctggaccaagccaaggaggaggtgttccgcctaccccaagaggaggaggaggggccgggggctggggatgagagttcctgtgggactggtggaggcacccaccggcgcagtaaaaaggccaaagcccctgagaggccggggactcgtgtcagtgagcgtcttcgtggagcccgggctgagactcaaggggcaaaccacactcctgtcatatccgcccatcaaactcgcagcaccaccacaccaccccgctgcagtcctgccagggagcgagttcccaggccagcacctaggcctcgacccactccagcttcagctccggctgcaattcctgcccttgttcctgtcccagtttctgccccagtacccatttcagccccaaatccaataaccattctccctgtccatatcttgccttctcctccccctccttcacagattcctccttgttcttctcctgcctgcacccctcctcctgcctgtacccctccaccagctcatacaccgcctccagcccaaacctgtcttgtaactccttcctctcctctcttgcttggtccaccttctgtgcccatctctgcctcagtcactaatctccccttgggcttgaggcctgaggcagagctgtgtgcccaggcattggcatctccagagtccctggagctggcttctgtggccagttcagaaacctcctcactttctcttgtgccccctaaagatctgttgccagttgctgtggagatcctgcctgtgtcagagaagaacctttctctcaccccttctgcacccagcctgaccttggaggctggcagcatccccaatggtcaagagcaggaggcaccagattctgctgaggggaccacccttacagtgctgcctgaaggtgaggagttgcccctgtgtgtgagtgagagcaatggcctggagctcccaccctcagcagcatctgatgagccacttcaggagccactggaggctgacaggacctcggaagagctgacagaggccaagaccccaacctccagcccagagaagccacaggaactcgttacagctgaggttgcagctccatccacctcatcttcagccacttcctcgcctgagggtccttcacctgcccgacctcctcggcgtcgcaccagtgctgatgtggaaattaggggtcaagggactggtcggccaggacaaccaccaggccccaaagtgcttcgaaagctgccaggacggctggtaactgtggtagaggaaaaggaactggtgcggcggcggcggcagcagcggggagctgccagcaccctagtgcctggggtctctgagactagtgccagcccgggaagcccgtctgtccgcagcatgtcagggccagaatcctcccctcccattggtgggccctgtgaagctgctccttcatcctcactgcccactccaccccagcagcccttcattgctcgccgtcacattgagctgggggtgactggtggtggcagccccgagaatggagacggagcactgctcgccatcaccccacctgctgtgaaacgtcggagggggaggccccccaagaagaacaggtctccagcagatgctgggagaggtgtggatgaggcaccctcatccaccttgaagggaaaaaccaatggggctgacccagtccctgggcctgagaccctaattgttgcagatcctgtcctggaaccacagcttattcctgggccccagcctcttggaccccagccagttcacagacccaatcccctcctgtcacctgtggagaaaagaaggcgaggacgaccccctaaagcacgagatttgcccatccctgggaccatttcctctgcaggggatggcaactccgaaagtcggacacagccacccccacacccatcacccctaaccccactcccaccactgctagtttgtcccactgctactgttgccaacactgtcaccactgtcaccatttcaacgtccccacccaaacggaagaggggccgacctcccaagaatcctccatcacctcggcccagccagctccccgtcttggaccgtgacagcacttctgttctcgagagctgtggattggggaggcgacggcaaccccagggccaaggggagagtgagggtagttcctctgatgaggatggaagccgccccctcacccgcctggcccgccttcggcttgaagcagaaggaatgcgaggacggaagagtggagggtccatggtggtggctgtaattcaggatgacctggacttagcagatagcgggccaggcgggttggaattgacaccacctgtggtctcactaaccccaaaactgcgctcgacccggctgcgtccagggtctctagtccccccactagagactgagaagttgcctcgcaaacgagcaggggccccagttggtgggagtcctgggctggcaaagcggggccgcctacagcccccaagtcccctggggcctgagggttcagtagaggagtctgaggctgaagcctcaggtgaggaggaggaaggggatgggaccccacgccgacgtcctggcccccgccggcttgttgggaccaccaaccaaggggaccagcgcatcctgcgcagcagcgcccctccctccctggctggccctgctgttagtcacagaggccgcaaggccaagacgtgagtgggctgcccctccacctaggctttccaccgtggccactccctccatgaccaggcctgactctgttaaccactacttgaagtcttgagggggaaagcctccagggagacataggggccttctcccttcttcccaccaaagtagggggtaggcaactggttgtcatggaaatggggatcatcacagtccccttccccttcaccccacgtggctgggcagtgttaagggtggcaagatagtctctgtccccacccccttgtacttgattccccagctgtctttcacacagccccccacccttaggggaagggggaggggcttctctacaatgaggtttttttctttttttttttttttaagaagaaaaaataataaacttagtttctgtatgaaaaaaaaaaaaaaa

SEQ ID NO: 123 - DNA, 3060 bp, Homo sapiens
  misc_feature: Incyte ID No: 975377CB1
gcgacgcgtacaggcggggaccgaacgggtgcctcagtgtccttcccctcccctcgcctggcctcgccgtcctctccccgcagccggaccggaactatgtgatcccggaagttccggggcctttgctgtgtgggataaacagtaatggcggaggctgcaactcccggaacaacagccacaacatcaggagcaggagcggcagcggcgacggcggcagcagcctcccccaccccgatccccacagtcaccgccccgtccctgggggcgggcggagggggcggcggcagcgacggcagcggcggcggctggactaaacaggtcacctgcaggtattttatgcatggggtttgtaaggaaggagacaactgtcgctactcgcatgacctctctgacagtccgtatagtgtagtgtgcaagtattttcagcgagggtactgtatttatggagaccgctgcagatatgaacatagcaagccattgaaacaggaagaagcaactgctacagagctaactacaaagtcatcccttgctgcttcctcaagtctctcatcgatagttggaccacttgttgaaatgaatacaggcgaagctgagtcaagaaattcaaactttgcaactgtaggagcaggttcagaggactgggtgaatgctattgagtttgttcctgggcaaccctactgtggccgtactgcgccttcctgcactgaagcacccctgcagggctcagtgaccaaggaagaatcagagaaagagcaaaccgccgtggagacaaagaagcagctgtgcccctatgctgcagtgggagagtgccgatacggggagaactgtgtgtatctccacggagattcttgtgacatgtgtgggctgcaggtcctgcatccaatggatgctgcccagagatcgcagcatatcaaatcgtgcattgaggcccatgagaaggacatggagctctcatttgccgtgcagcgcagcaaggacatggtgtgtgggatctgcatggaggtggtctatgagaaagccaaccccagtgagcgccgcttcgggatcctctccaactgcaaccacacctactgtctcaagtgcattcgcaagtggaggagtgctaagcaatttgagagcaagatcataaagtcctgcccagaatgccggatcacatctaactttgtcattccaagtgagtactgggtggaggagaaagaagagaagcagaaactcattctgaaatacaaggaggcaatgagcaacaaggcgtgcaggtattttgatgaaggacgtgggagctgcccatttggagggaactgtttttacaagcatgcgtaccctgatggccgtagagaggagccacagagacagaaagtgggaacatcaagcagataccgggcccaacgaaggaaccacttctgggaactcattgaggaaagagagaacagcaacccctttgacaacgatgaagaagaggttgtcacctttgagctgggcgagatgttgcttatgcttttggctgcaggtggggacgacgaactaacagactctgaagatgagtgggacttgtttcatgatgagctggaagatttttatgacttggatctatagcaaccttgcgtggcgtgtgaactggtctgctgacctcagacagcagctgtcccctgtggtggtgtggcagtgcctgtgttctctcctaggcaggcctctcaactccaggtgctgtcctaagaatttttacccagggcctgtcttctcaacccctcacctttccctgaggagtgtgttgttttccctgttgaaaaaagttacaaaaataaatcttaaagttagttttttgtaacacgaatttaactgtcagacagttagtgtaggtgtgttgcgtcatctgttttcaaccagattgcatttatggacttttcacacactcattttgaggaccccaggttcaaaagtaaaagcagtggccctgctttggggtccaagaataggagtgatgggtgaagggacctaagctggccaatagccctctgccccagacatgggatgtggatccttgaggtttctggtgaaatctgcacatctgtgtttttatatctgttccctaccctgtaatccctaccacgtgcacttgttctgtggttttggtctcttgtttaattgcacacaagtaatactactgggtaaccagaatcaggtgtgaatgtgttgagattttttactgttttgcatgataggaaaattgagaaagaatacgtataaaagatagagaggcataacatcaatgcagagttggaagttggctcccaagggctgacatggtgtgagtgtgtgggtgtgtgataagcttctcatccctgcatagatgcagtattcttagccttagtagaaaaacctggtttagtggtttaagccttgtgtggcagatagatcttaaagggcaaagcagtatattggtagttgtcaatatagcagtgctagctctgtctatataaatagagaaatggggttagccatagaggttaaaactacctggttatcccatataataacacaaactgggtcttggatacacagttgtatttaatgttttacgatctagcctttccagtacaggcactttctgagaaacctttgtcctcacttgaggcattttgttgtcgggtttttgtgtttgtttttgtgggtatttgcctcattccacccctgagctttcaggtagacagacgtgattcaaaactctgttctaaggtgtttattgtagtggagtaatgggtttgcagtgataagtcatacttttccaccgaaagggagggcttgggaatccctgagattagctaaagttaagttgttggaagaattccttgattggaaattgtacctttgtgttttgttgctctgtttcctgaaaataactcggggatgctcctggtttgtccatctactgctttgattccttggatcccacccattctttcactttaagaaaaaacaaataattgttgcagaggtctctgtattttgcagctgcccttttgtaagaagcacttttcccaaataaaacaattaaaaaaaaaa

SEQ ID NO: 124 - DNA, 2102 bp, Homo sapiens
  misc_feature: Incyte ID No: 1208721CB1
gtgcaacaagacagctttgctggagggcctggaggtggaccagtacatgctgggcatcctgatttacattcagaactctgactatgaggagatcaccatcgaccccacgtgcagctggaagccagtgcccgtgaagcctgacatgcacatcaaggaggagccggatgggccagcactgaagcgctgccgcaccgtgagccccgcccacgtgctcatgcccagcgtgatggagatgatcgccgccctgggccccggcgctgccccctttgcccccctgcagcccccctcagtccctgcccccagcgactaccctggccagggttccagcttcctggggcctggaactttccctgagtccttcccacccaccacgcccagcaccccaacccttgctgagttcaccccgggaccaccccccatctcctaccagtctgacattcccagcagcctcctgacttcagagaagtctaccgcctgcctcccaagccagatggcaccagcaggtcacctggaccccactcacaatcctgggacaccaggactacacacctccaaccttggggcccctccaggtccccagctgcaccattcaaaccctcccccagcgtcccggcagtccttgggccaagcgagcttaggacctacgggtgaactggccttcagtcctgccacaggcgtgatggggccccccagcatgtctggagccggggaggccccagaaccagctctggacctgctcccggaactgaccaaccctgatgagctactgtcctacttgggcccacccgacctccctacgaacaacaatgacgacctgctttctctgtttgagaacaactgatcctgtgtttaccccaagcccggcggggacacgctcacagatgtcaccacagccctgcccttcatgcccagccccatgggacacccggtggtctttcccaaacctcccccaaaacacacctggagccagagccttctgccgccagccctgcccctgaattggaagcagccctgtgctcgatgggaggggctcccaggccggcagcccttgccacctccctctgccaagcctgctgctgcagaacggtttttgctgaggtgcccctgcccagccctgtccagccttgtccacacacacatctcacgcccctggtctcacagcctcacaccttgtccttccacccctgcctgcccccacccagcctgcttcttgtccagcattgatccttctgtttcaacaactcctccactgggcagagctgggcatctggcagggctggctctgtcccctgggcctttggctccagtggcccctgtgcccagcagtccagctcttggaacctcgctgaatggcagcctcttgggggcctggagctctggcagcccagccgtgtgtggtgtcaggttcctctccccaccccagcttcaagcagaggcctcggggtgggggagctacaaagcacaacaatgtacatagtgtagaaacactaacagctgggagaggggagccagctgtccagccagcatgttcctgttgtacagcccggtctccctgcgcgctctgctccttcccatgtgcagacagatcagggaggaacctccaatgggtgggggacagtgagcttcggcctggccaaggtgggtgggtgggctctcagattcagctctgtgtaaagattctctagcgggctgcgctcccaagttcccctgctctgtgaaagtgaagaattagtacagctgtgttttttaaagccacctctctgtctccaccccatgggcccacacccaggtgggggaggaggaagccactgcatctgttggctcagggccccagcctgtgcgagcagggcgcctgggctgttgtgtctcctgtctgtgccgatctctattaaaggactccctcttggtcggcctgcgcgagtccctcctttgtgctcccagggactatttgctcctcgtaagccagcgacctgcctaaagcttgggctgtgcctgcaaaagttgggcaggacctgggtgccaggtcgaccttcaagtgggcttttggggccccaggttgagctctggaaggttcaagccaaggttcgggtaatcgcgtccgg

SEQ ID NO: 125 - DNA, 2856 bp, Homo sapiens
  misc_feature: Incyte ID No: 1234329CB1
tatcatgaacagcaggcattgccagtggacctgagcaacagtggtatcagaagtcatggaagtggcagttttcatggagcatctgcatttgacccctgctgccctgtttcttcctcccgagctgcaatctttggccatcaggccgctgctgctgccccaagtcaacctttatcatcaatagatggctatggttcaagcatggttgcgcagccccaagcccccagccccctccacagccctctctctcatcatgtcgacattacatgccacccccttatgcctctttgacaaggccacttcatcatcaagcttctgcctgcccgcattctcatggaaacccccctcctcagactcagcctccgcctcaagtggattatgttattcctcatcctgtacatgctttccattctcaaatatcttctcatgcaacatctcatcctgtggcacccccaccaccaactcacttagccagtacagctgcaccaatccctcagcatcttcctcctacacaccagccaatttcgcaccatattccagccacagcacctccagcacagagactgcatcctcatgaagtgatgcagaggatggaagttcaaaggaggaggatgatgcagcatccaactggtctttttgtgttctgtgtttccaggcgggcacatgaacgccccccaccccatccacataggatgcacccaaactatggtcatgggcatcatattcatgtgcctcagactatgtcctcacatcctcgacaggctccagagaggtctgcctgggaactgggaattgaagctggagtgactgcagctacttatacacctggtgcattgcatcctcacttggcccattatcacgcacctcctcgacttcatcacttacaattaggagctcttcctttaatggttcctgatatggcaggctatcctcacatccgttacatttcatcaggattggatggaacatcattcagaggtcctttcaggggcaattttgaggaactgattcatttggaagaaagattaggcaatgtcaatcgtggagcatcccaggggacaattgaaagatgtacatatccacataaatacaaaaagaggaaactgcactgcaaacaagatggggaagaagggactgaggaagacacagaggaaaaatgtactatctgtttgtctattttagaggaaggtgaagatgtgagacgtcttccatgtatgcaccttttccaccaagtgtgtgttgaccaatggttgattaccaataagaagtgccccatatgcagagtggacattgaggcccagctgccaagtgaaagttgacaccatgtttcagaactcttgccctccctctcattcccatccttcctggtactgcagtcaaccaaagatggcatgacttacctgcgcagatttggaagcattgaacttagagtgctggctctgctatatggtacaactaatgctagacctacagtttatgtatacagttgattttgatgtatttataaaagcttttttttctagatttgacatttttctgtatcattttactgtatttttgcatggttccttgtattgcatttctttgcacatattatgggcttgtgaccctaaacttgcaggcaaggttagctgctttagtaagtagaattttgtggtctttttgttttttacatagtaccaagccttgataattatgaattttttatccattactaacctttaatttaatcaatcatgtactttagtttaatgtataaagatcctctagaaaatgataatattgtgtattaagacattccttaattaggacaaaatggctgctgtatatttactatatggagttctgagttaaataccatccttaatactgggaacagaatacaacccatataaatcagatgcaggtggtagtcacatcaccagagtgatcagtataaattttcttggtgtatccttttcctttcaacacagtgcagataagagttgaatattgatatcatacatttagactgctgttctgattgcatttatctttttcctacatcatttagaattttatttccctgattcagtttttgctgctgtgaaacagctctgatgaacactaaatattaatttcaattagctagattgtacatacttgcagatttaacaaaattttagggaaattgaaaaagacatgtagaatttgttgtcttctgctaagcacgaaaagttaagatatctgcttacattgattttgtagacacattaagtcaagatttggaatttaagtcactggcaggtatctgtgcattcatagaacttataaaggtcccaggatcacttttaagggatttttattagtttaaaggtaaataaagtcagctgaatctacatgtctcttgttttatttctctctaaacttgaaaacagtaaatctgcagatactgtgaggcacaaattatactgtcaacctactgttgctatggttatatactcccacttcatacattaccaagagtcgatcactgatttaaaatttttaatttctatagttaagatttactgcataatatagaatataaagttaagttaacatactaacatttctcctttggaggaagttttaatctacttcaggatgcatattattatcaagatactttcatatacaggatagcctaattttatttgtttaaatatgcttaatatgccccagattgcaaatgcatccagtcagtaatatcactgtctgtatgtggaggacatgttcccatggatcatatgtgaagatgtcaataagcttgcattaagccacctgctttgtaagtggattgattaataaataacttatatttctattgtcaaaaaaaaa

SEQ ID NO: 126 - DNA, 1956 bp, Homo sapiens
  misc_feature: Incyte ID No: 1238747CB1
cttcctgttttgcctgctagcatctccctgtaactctcccaatcttgaggagtgatccctgtcccagcccctggaaaggggcaggaacgacaaactcaaagtccaggatgttcaccatgacaagagccatggaagaggctctttttcagcacttcatgcaccagaagctggggatcgcctatgccatacacaagccatttcccttctttgaaggcctcctagacaactccatcatcactaagagaatgtacatggaatctctggaagcctgtagaaatttgatccctgtatccagagtggtgcacaacattctcacccaactggagaggacttttaacctgtctcttctggtgacattgttcagtcaaattaacctgcgtgaatatcccaatctggtgacgatttacagaagcttcaaacgtgttggtgcttcctatgaacggcagagcagagacacaccaatcctacttgaagccccaactggcctagcagaaggaagctccctccataccccactggcgctgcccccaccacaaccccctcaaccaagctgttcaccctgtgcgccaagagtcagtgagcctggaacatcctcccagcaaagcgatgagatcctgagtgagtcgcccagcccatctgaccctgtcctgcctctccctgcactcatccaggaaggaagaagcacttcagtgaccaatgacaagttaacatccaaaatgaatgcggaagaagactcagaagagatgcccagcctcctcactagcactgtgcaagtggccagtgacaacctgatcccccaaataagagataaagaagaccctcaagagatgccccactctcccttgggctctatgccagagataagagataattctccagaaccaaatgacccagaagagccccaggaggtgtccagcacaccttcagacaagaaaggaaagaaaagaaaaagatgtatctggtcaactccaaaaaggagacataagaaaaaaagcctcccaagagggacagcctcatctagacacggaatccaaaagaagctcaaaagggtggatcaggttcctcaaaagaaagatgactcaacttgtaactccacggtagagacaagggcccaaaaggcgagaactgaatgtgcccgaaagtcgagatcagaggagatcattgatggcacttcagaaatgaatgaaggaaagaggtcccagaagacgcctagtacaccacgaagggtcacacaaggggcagcctcacctgggcatggcatccaagagaagctccaagtggtggataaggtgactcaaaggaaagacgactcaacctggaactcagaggtcatgatgagggtccaaaaggcaagaactaaatgtgcccgaaagtccagatcgaaagaaaagaaaaaggagaaagatatctgttcaagctcaaaaaggagatttcagaaaaatattcaccgaagaggaaaacccaaaagtgacactgtggattttcactgttctaagctccccgtgacctgtggtgaggcgaaagggattttatataagaagaaaatgaaacacggatcctcagtgaagtgcattcggaatgaggatggaacttggttaacaccaaatgaatttgaagtcgaaggaaaaggaaggaacgcaaagaactggaaacggaatatacgttgtgaaggaatgaccctaggagagctgctgaagagtggacttttgctctgtcctccaagaataaatctcaagagagagttaaatagcaagtgaatttctactaccctctcagtcaccatgttgcagactttccctgtctggaggctcaccttagagcttctgagtttccaagctctgagtcacctccacatttgggcatggcatcttcaaaacaattaatttgcatagttaatttgggatggggaagcaaatgactctaaaataaaaattaaatgaaaaagcaaaaaaaaaa

SEQ ID NO: 127 - DNA, 1588 bp, Homo sapiens
  misc_feature: Incyte ID No: 1265980CB1
tgaaggtcccaagagagaggatcacatggctctctctgccctgtgacgtcactagcagatggcatgggtaccagctctggcagttggcatcaatgtcactttttagagatcaatgagatagtgcagatatacacagatctagagactccaggagacgatgcgacactcagcctgaaaagatttggaagacccaaaatgaaaactgattattgaatgaaattaaaacctaaggtaatttaagattagagaaccatgttaacactaccgtttgatgagtctgttgtaatgccagaatcccagatgtgcagaaagttttctagagaatgcgaggaccagaagcaaattaagaagccagaaagcttttccaaacagattgtccttcgaggaaagagcatcaaaagggcccctggagaagaaaccgagaaagaagaagaggaggaagacagggaagaggaagatgaaaatgggttgcctagaaggaggggtcttaggaaaaaaaagacaacaaagctgcgattggaaagggtcaagttcaggagacaggaagcgaacgcgcgcgagaggaacaggatgcacggcctcaacgacgctctggacaacttaagaaaagtggtcccctgttattctagaacccagaaactgtccaaaatagagactttacgactggccaaaaactacatctgggcactttctgaaattctgagaatcggcaagagaccagatctgctcacattcgtccaaaacttatgcaaaggtctttcccagccaactacaaacttggtggcaggctgcttgcagctcaacgccaggagtttcctgatgggtcagggtggggaggctgcacaccacacaaggtcaccctactctaccttctacccaccctaccacagccctgagctcaccactcccccagggcatgggactcttgataattccaagtccatgaaaccctacaattattgcagtgcgtatgaatccttctatgaaagtacttcccctgagtgtgccagccctcagtttgaaggtcccttaagtcctcccccaattaactataatgggatattttccctgaagcaagaagaaaccttggactatggtaaaaattacaattacggcatgcattactgtgcagtgccacccaggggtccccttgggcagggtgccatgttcaggttgcccaccgacagccacttcccttacgacttacatctgcgcagccaatctctcacaatgcaagatgaattaaatgcagtttttcataattaatgaggaaaatgaaaataaacagtggtcattcacctcccctgtctaattaagacaaagcagatgcttgtgggctgagtaattggcacaactctatctaaggtgtttactagtttctgaagtgtgtttcaactattgtgagaattttctatgtaataataaatctcttttcgtatgagaacttcttttcctttccttttgtctgtgaagcactgtgattctgtttctactggaaagatttttttctttttaattttcttttaaacttatttaatttgtttgaacaaggtgtctaagaatatactgttgaataaagcagtcgccc

SEQ ID NO: 128 - DNA, 2205 bp, Homo sapiens
  misc_feature: Incyte ID No: 1297333CB1
atctgttaggggacactgggattatgatgctctgtttgagacacagccgggcttggtgactatcaaaaacctggctgttgacttccgccagcagctacacccagctcagaagaatttctgtaagaatgggatatgggagaacaacagtgacctgggatcagcaggacattgtgtggctaagccagatttagtctctttactagagcaagagaaggagccctggatggtgaagcgagagctgacaggaagcctgttctcaggccagcgatctgtacatgagacccaggaattatttccaaagcaagattcatatgctgaaggggtaacagacagaacctcaaacactaaacttgattgttccagtttcagagaaaattgggattctgactatgtgtttggaaggaagcttgcagtaggtcaagagacacaattcaggcaagagccaattactcataacaaaaccctctctaaggaaagagaacgtacatataacaaatctggaagatggttctatttggacgattcagaagagaaagttcataatcgtgattcaattaaaaattttcaaaaaagttcagtggtaataaaacaaacaggcatctatgcaggaaaaaagcttttcaagtgtaatgaatgtaagaaaacttttacccagagctcatctcttactgttcatcagagaattcacactggagagaaaccttataaatgtaatgaatgtgggaaggcctttagtgacggctcatcctttgcccgacaccagagatgtcacactggcaagaagccctatgagtgcattgagtgtgggaaagctttcatacagaacacatcccttatccgtcactggagatactatcatactggggagaaaccctttgattgcatcgattgtgggaaagccttcagtgaccacatagggcttaatcaacacaggagaattcatactggagagaaaccttacaaatgtgatgtatgtcacaaatccttcaggtatggttcctcccttactgtacatcaaaggattcataccggagaaaaaccatatgaatgtgatgtttgcagaaaagccttcagccatcatgcatcactcactcaacatcaaagagtacattctggagaaaagccttttaagtgtaaagagtgcggaaaagcttttaggcagaatatacaccttgccagtcatttaaggattcatactggggagaagccttttgaatgtgcggagtgtggaaaatccttcagcatcagttctcagcttgccactcatcagagaatccatactggagagaagccctatgaatgtaaggtttgtagtaaagcgttcacccagaaggctcaccttgcacagcatcagaaaacccatacaggagagaaaccatatgagtgcaaggaatgcggtaaagccttcagccagaccacacacctcattcaacatcagagagttcacactggtgagaaaccctataaatgtatggaatgtgggaaggcctttggtgataactcatcctgtactcaacatcaaagactgcacactggccaaagaccttatgaatgtattgagtgtggaaaggcattcaagacaaaatcctcccttatttgtcatcgcagaagtcatactggagaaaaaccttatgaatgcagtgtgtgtggcaaagcctttagtcatcgtcaatcccttagtgtacatcagagaatccattctggaaagaaaccatatgaatgtaaggaatgtaggaaaaccttcatccaaattggacaccttaatcaacataagagagttcatactggggagagatcttataactataagaaaagcagaaaagtcttcaggcaaactgctcacttagctcatcatcagcgaattcatactggagagtcgtcaacatgcccctctttaccttccacgtcaaatcctgtggatctgtttcccaaatttctctggaatccatcctccctcccatcaccatagcctcgagacgtcatttctgtttgactactccagcagtttaaaaccccatctccctgcccttttgttttctttttgtcccttattagttagttcttcacataagtgtaaatgtaacttattcactcctcttgtaaaacttatagtttctttaaattggttaatgtgtgagatgtgctcagcacagtgcctggtccatagtaagtgctcagtaaacttagctgttttaaaaaaaaaaa

SEQ ID NO: 129 - DNA, 2735 bp, Homo sapiens
  misc_feature: Incyte ID No: 1312824CB1
attttaacagctaaaacttgtcggattgctttttattttcaagctcaaaagacgatagagaaagaatacttgaaggccaagaagcttgagagaagaaaaatttcagaaaaattgtctcaatttgactagaatatcaatgaaccaggaaaactgaagcaccttccctaaagaaaacttgggtatacaattactccacagacagagctgagggttttttacccaaatcagtcactggattttgctgcctgatacgtgaatcttcttggaatttttctcatgtggatctaaggggaatgctttattatggctgctgttgtccaacagaacgacctagtatttgaatttgctagtaacgtcatggaggatgaacgacagcttggtgatccagctatttttcctgccgtaattgtggaacatgttcctggtgctgatattctcaatagttatgccggtctagcctgtgtggaagagcccagtgacatgattactgagagttcactggatgttgctgaagaagaaatcatagacgatgatgatgatgacatcacccttacagttgaagcttcttgtcatgacggggatgaaacaattgaaactattgaggctgctgaggcactcctcaatatggattcccctggccctatgctggatgaaaaacgaataaataataatatatttagttcacctgaagatgacatggttgttgccccagtcacccatgtgtccgtcacattagatgggattcctgaagtgatggaaacacagcaggtgcaagaaaaatatgcagactcaccgggagcctcatcaccagaacagcctaagaggaaaaaaggaaacacaatttatctttgggagtttttactggcactgctccaggacaaggctacttgtcctaaatacatcaagtggacccagcgagagaaaggcatttttaaattggtggattctaaagcagtgtccaggttgtgggggaagcacaaaaacaaacctgatatgaattatgagaccatgggaagagcactcaggtactattaccaaaggggtattctggcaaaagtggaaggtcagcgcttggtgtatcagtttaaagaaatgccaaaagatcttatatatataaatgatgaggatccaagttccagcatagagtcttcagatccatcgctatcttcatcagccacttcaaataggaatcaaaccagccggtcgagagtatcttcaagtccaggggtaaaaggaggagccacttcagttctaaaaccagggaattctaaagctgcaaaacccaaagatcctgtggaagttgcacaaccatcagaagttttgaggacagtgcagcccacgcagtctccatatcctacccagctcttccggactgttcatgtagtacagccagtacaggctgtcccagagggagaagcagctagaaccagtaccatgcaggatgaaacattaaattcttccgttcagagtattaggactatacaggctccaacccaagttccagtggttgtgtctcctaggaatcagcagttgcatacagtaacactccaaacagtgccactcacaacagttatagccagcacagatccatcagcaggtactggatctcagaagtttattttacaagccattccatcatcacagcccatgacagtactgaaagaaaatgtcatgctgcagtcacaaaaggcgggctctcctccttcaattgtcttgggccctgcccaggttcagcaggtccttactagcaatgttcagaccatttgcaatggaaccgtcagtgtggcttcctctccatccttcagtgctactgcacctgtggtgaccttttctcctcgcagttcacagctggttgctcacccacctggcactgtaatcacttcagttatcaaaactcaagaaacaaaaactcttacacaggaagtagagaaaaaggaatctgaagatcatttgaaagagaacactgagaaaacggagcagcagccacagccttatgtgatggtagtgtccagttccaatggatttacttctcaggtagctatgaaacaaaacgaactgctggaacccaactctttttagttaatataccaaagcttatgaataattgtttgttaattgaacattttcaattatatgcagactgactgattctaagataaattctaaggaggtttctaattttgtaattgttaaaaatagagttaattttgactttgttagatgagggaggaaaactcaactgtttctctttgttatctaaatgtttcagaattcaatcgtgaaggaacaggcattttacactatgaagacattcttttgagatttttatttcagttgctatatcataagcatttttaaagtttcttttctaattttacattgtattagattttctgattcttttgtaaatacagaacttaaatagaaggcaacaggaaatttatataggaactattttcattccacttgtgtaagttaagtcttgactctttcaaatgcaaaaaacctattttatgctttgttaaaattatggtgtcacttagattgactttagttgactgcactatataatatagaactatgaatatgtagaatacatgaaaaattggaggtgctggtggtatggctgaccctgtttcagaagcaggatagtattaaagcatcagcctaagaatggcactcccactaactagccatgtaatcttgacctctttgggccttagttcctctcataa

SEQ ID NO: 130 - DNA, 3174 bp, Homo sapiens
  misc_feature: Incyte ID No: 1359294CB1
cttatggcggcgctggagagggggcgctgagctgttgggtatgaagtgtaacagaacagactttaccacctgaaactgctgcttcaagttcagatcaggcaaggaacaaacctcgtaacaactaacaagaccaaagaagagtacacttaagttgaagacacaacacttgatctgaaacaagaagtttgtgcctactcaacagctttgaaagagcacttcccaacgctgctagtagtctttgttttcttcagtgctgtactgtgagattgcccggtacagcagcagttgtattctttattagcttggtagatcattttctctcgctcttttttttaatactagcaactttcatcctttgaaacgtgtgctgaaaaagaagaatcagcaaatactactgaaagtgcaatatttgagtatcactgcgagatgagctttgatccaaaccttctccacaacaatggacataatgggtaccctaatggtacttcagcagcactgcgtgaaactggggttattgaaaaactgttaacctcttacggatttattcagtgttcagaacgtcaagctagacttttcttccactgttcacagtataatggcaacctgcaagacttaaaagtaggagatgatgttgaatttgaagtatcatcggaccgacggactgggaaacccattgctgttaaactggtgaagataaaacaagaaatcctccctgaagaacgaatgaatggacaagaagtgttttatctgacttacacccctgaagatgtcgaagggaacgttcagctggaaactggagataaaataaactttgtaattgataacaataaacatactggtgctgtaagtgctcgcaacattatgctgttgaaaaagaaacaagcccgctgtcagggagtagtttgtgccatgaaggaggcatttggctttattgaaagaggtgatgttgtaaaagagatattctttcactatagtgaatttaagggtgacttagaaaccttacagcctggcgatgatgtggaattcacaatcaaggacagaaatggtaaagaagttgcaacagatgtcagactattgcctcaaggaacagtcatttttgaagatatcagcattgaacattttgaaggaactgtaaccaaagttatcccaaaagtacccagtaaaaaccagaatgacccattgccaggacgcatcaaagttgactttgtgatccctaaagaacttccctttggagacaaagatacgaaatccaaggtgaccctgctggaaggtgaccatgttaggtttaatatttcaacagaccgacgtgacaaattagagcgagcaaccaatatagaagttctgtcaaatacatttcagttcactaatgaagcccgagaaatgggtgtgattgctgccatgagagatggttttggtttcatcaagtgtgtggatcgtgatgttcgtatgttcttccacttcagtgaaattctggatgggaaccagctccatattgcagatgaagtagagtttactgtggttcctgatatgctctctgctcaaagaaatcatgctattaggattaaaaaacttcccaagggcacggtttcatttcattcccattcagatcaccgttttctgggcacggtagaaaaagaagccactttttccaatcctaaaaccactagcccaaataaaggcaaagagaaggaggctgaggatggcattattgcttatgatgactgtggggtgaaactgactattgcttttcaagccaaggatgtggaaggatctacttctcctcaaataggagataaggttgaatttagtattagtgacaaacagaggcctggacagcaggttgcaacttgtgtgcgacttttaggtcgtaattctaactccaagaggctcttgggttatgtggcaactctgaaggataattttggatttattgaaacagccaatcatgataaggaaatctttttccattacagtgagttctctggtgatgttgatagcctggaactgggggacatggtcgagtatagcttgtccaaaggcaaaggcaacaaagtcagtgcagaaaaagtgaacaaaacacactcagtgaatggcattactgaggaagctgatcccaccatttactctggcaaagtaattcgccccctgaggagtgttgatccaacacagactgagtaccaaggaatgattgagattgtggaggagggcgatatgaaaggtgaggtctatccatttggcatcgttgggatggccaacaaaggggattgcctgcagaaaggggagagcgtcaagttccaattgtgtgtcctgggccaaaatgcacaaactatggcttacaacatcacacccctgcgcagggccacagtggaatgtgtgaaagatcagtttggcttcattaactatgaagtaggagatagcaagaagctctttttccatgtgaaagaagttcaggatggcattgagctacaggcaggagatgaggtggagttctcagtgattcttaatcagcgcactggcaagtgcagcgcctgtaatgtttggcgagtctgtgagggccccaaggctgttgcagctcctcgacctgatcggttggtcaatcgcttgaagaatatcactctggatgatgccagtgctcctcgcctaatggttcttcgtcagccaaggggaccagataactcaatggggtttggtgcagaaagaaagatccgtcaagctggtgtcattgactaaccacatccacaaagcacaccattaatccactatgatcaagttggggggaatctggtgaagggttctgaatatctccctcttcatccctcccgaaatctggaatacttattctattgagctattacaccagttttaacaccttcctcgtgttatgtttaaaaaaataaataaatttaagaaaaccattttaaataatgcacagttgcagcctggaaaaacttaaggtggcgccttatagtatcaattttaggagctttatttggtgcatttaacgcaactggtaattgcagaatccactttgcctgtgtaagtgaaaaatatagactgttatcttgttggccctatgaaattctgcacttttcattatatactctaccttcattaattacttctggcaagatgttctgccttagcactcagttgcattcttttcctttttcttcc

SEQ ID NO: 131 - DNA, 1871 bp, Homo sapiens
  misc_feature: Incyte ID No: 1377380CB1
ctggcgcttgaatagaggcttagaggagaaaccaggaggtgataaactttccacggtgggttgggcctctcagaagaaaaaagagtcaagacctggcctagtaacagtaacgagtagccagagtactcctgccaaagcccccagggtaaagtgcaatccatccaattcttccccgtcatccgcagcttgtgccccaagctgtgctggagacctccctcttccttcaaatactcctacgttctctattaaaacctctcctgccaaggcccggtctcccatcaacagaagaggctctgtctcctccgtctctcccaagccaccttcatctttcaagatgtcgattagaaactgggtgaccccgaacaccttcctcatcaccacccatcactccacctgcttcggagaccaagatcatgtctccgagaaaagcccttattcctgtgagccagaagtcatcccaagcagaggcttgctctgagtctagaaatagagtaaagaggaggctagactcaagctgtctggagagtgtgaaacaaaagtgtgtgaagagttgtaactgtgtgactgagcttgatggccaagttgaaaatcttcatttggatctgtgctgccttgctggtaaccaggaagaccttagtaaggactctctaggtcctaccaaatcaagcaaaattgaaggagctggtaccagtatctcagagcctccgtctcctatcagtccgtatgcttcagaaagctgtggaacgctacctcttcctttgagaccttgtggagaagggtctgaaatggtaggcaaagagaatagttccccagagaataaaaactggttgttggccatggcagccaaacggaaggctgagaatccatctccacgaagtccgtcatcccagacacccaattccaggagacagagcggaaagacattgccaagcccggtcaccatcacgcccagctccatgaggaaaatctgcacatacttccatagaaagtcccaggaggacttctgtggtcctgaacactcaacagaattatagattctaatctgagtgagttactgagctttggtccactaaaacaagctgagctttggtccactaaaacaagatgaaaaatacaagagtgactctataactctggtctttaagaaagctgccttttcatttttagacaaaatcttttcaacgctgaaatgtacctaatctggttctactaccataatgtatatgcagcttcccgaggatgaatgctgtgtttaaatttcataaagtaaatttgtcactctagcattttgaatgaatagtcttcactttttaaattattcatcttctctataataatgacatcccagttcatggaggcaaaaaacaagtttcttgttatcctgaaactttctatgctcagtggaaagtatctgccagccacagcatgaggcctgtgaaggctgactgagaaatcctctgctgaagacccctggttctgttctgcctccaacatgtataattttatttgaaatacataatcttttcactatgcttttgtggggttttttttaagtatgtgtaaaaatgtgatgctcagataagtacatttatatcagttcagtgttaaaatgcagtctcttgagttaaagtcatctttattttaaatgcagtgataaatgtcaactcttcggagaaactaggagaacaacaacagaaagctgtgtttgtcttttttctctcaaatatatctcccgtatgagatttcaggtccccatgttttcaccaagcaatctgctatgtcagccaacccaacatcactttctacaggaggttatgatttttgccatttactagaggaagatgttttatgaaatcaatttggggtttgaa

SEQ ID NO: 132 - DNA, 2377 bp, Homo sapiens
  misc_feature: Incyte ID No: 1383473CB1
gtcaggttaggccggtggggtgcggtcctggtcggaaggaggtggagagtcgggggtcaccaggcctatccttggcgccacagtcggccaccggggctcgccgccgtcatggagagcggagggcggccctcgctgtgccagttcatcctcctgggcaccacctctgtggtcaccgccgccctgtactccgtgtaccggcagaaggcccgggtctcccaagagctcaagggagctaaaaaagttcatttgggtgaagatttaaagagtattctttcagaagctccaggaaaatgcgtgccttatgctgttatagaaggagctgtgcggtctgttaaagaaacgcttaacagccagtttgtggaaaactgcaagggggtaattcagcggctgacacttcaggagcacaagatggtgtggaatcgaaccacccacctttggaatgattgctcaaagatcattcatcagaggaccaacacagtgccctttgacctggtgccccacgaggatggcgtggatgtggctgtgcgagtgctgaagcccctggactcagtggatctgggtctagagactgtgtatgagaagttccacccctcgattcagtccttcaccgatgtcatcggccactacatcagcggtgagcggcccaaaggcatccaagagaccgaggagatgctgaaggtgggggccaccctcacaggggttggcgaactggtcctggacaacaactctgtccgcctgcagccgcccaaacaaggcatgcagtactatctaagcagccaggacttcgacagcctgctgcagaggcaggagtcgagcgtcaggctctggaaggtgctggcgctggtttttggctttgccacatgtgccaccctcttcttcattctccggaagcagtatctgcagcggcaggagcgcctgcgcctcaagcagatgcaggaggagttccaggagcatgaggcccagctgctgagccgagccaagcctgaggacagggagagtctgaagagcgcctgtgtagtgtgtctgagcagcttcaagtcctgcgtctttctggagtgtgggcacgtttgttcctgcaccgagtgctaccgcgccttgccagagcccaagaagtgccctatctgcagacaggcgatcacccgggtgatacccctgtacaacagctaatagtttggaagccgcacagcttgacctggaagcacccctgcccccttttcagggatttttatctcgaggcctttggaggagcagtggtgggggtagctgtcacctccaggtatgattgagggaggaattgggtagaaactctccagacccacgcctccaatggcaggatgctgcctttcccacctgagaggggaccctgtccatgtgcagcctcatcagagcctcaccctgggaggatgccgtggcgtctcctcccaggagccagatcagtgtgagtgtgactgaaaatgcctcatcacttaagcaccaaagccagtgatcagcagctcttctgttcctgtgtcttctgtttttttctggtgaatcgttgcttgctgtggacttggtggaggactcagaggggaggaaaggctgggccccgagtacaacggatgccttgggtgctgcctccgaagagactctgccgcagcttttcttctttttcctcatgccccgggaaacagtctttcttcagaattgtcaggctgggcaggtcaacttgtgttcctttcccctcacctgcttgcctccttaacgcctgcacgtgtgtgtagaggacaaaagaaagtgaagtcagcacatccgcttctgcccagatggtcggggccccgggcaacagattgaagagagatcatgtgaagggcagttggtcaggcaggcctcctggtttacgcactggtccctggttttccctcctggagaatgaggcgcagaggcctcgcctcctgaaggacgcagtgtggatgccactggcctagtgtcctggcctcacagcttccttgcaaggctgtcacaaggaaaagcagccggctggcaccctgagcatatgccctcttggggctccctcatccagcccgtcgcagcttgacatcttggtgtactcatgtcgcttctccttgtgttaccccctcccagtattaccatttgcccctcacctgcccttggtgagccttttagtgcaagacagatggggctgttttcccccacctctgagtagttggaggtcacatacacagctcttttttttattgcccttttctgcctctgaatgttcatctctcgtcctcctttgtgcaggcgaggaaggggtccctcaggggccgacactagtatgatgcagtgtccagtgtgaacagcagaaattaaacatgttgcaaccaaaaaaaaaaaa

SEQ ID NO: 133 - DNA, 1894 bp, Homo sapiens
  misc_feature: Incyte ID No: 1388860CB1
gctcgaggcaggttgttgtcgggataccagatttcctactccgagaggccccgggtccctctgccacaacttctgtcgctctgccgcctgcaccgtgacccgcactattcacgggagccctagagaggacaccgggacacccagaagccgggaaatgatgtttcaggattcagtggcctttgaggatgtggctgtcagcttcacccaggaggagtgggctttgctggatccttcccagaagaatctctacagggatgtgatgcaggaaaccttcaagaacctgacctctgtaggaaaaacatggaaagttcagaacattgaagatgagtacaaaaatcccaggagaaatctaagtcttatgagagagaaactctgtgaaagtaaagaaagtcatcactgtggagaaagcttcaaccagattgcagatgacatgctgaacaggaaaactcttcctggaataacaccatgtgaaagcagtgtgtgtggagaagttggcacgggtcattcatctcttaatacgcatatcagagctgacactggacacaagtcatctgagtatcaggaatatggagagaatccatatagaaataaggaatgtaagaaagccttcagttatcttgactcccttcaatcacatgataaagcttgcactaaagagaaaccctatgatggtaaagaatgtacagaaaccttcatttcccattcatgcattcaaagacacagggtaatgcacagtggagatggaccttataaatgtaagttttgtgggaaagccttctattttctcaatttatgtcttatccatgaacgaattcacactggtgtgaaaccatataagtgtaaacaatgtggtaaggcctttactcgttccactacccttccagtacatgaaagaactcacacaggagtgaatgccgatgaatgtaaagaatgtgggaatgcattcagttttcctagtgaaattcgtagacataaaaggtctcacactggagaaaaaccctatgagtgtaagcaatgtgggaaagtcttcatttctttcagttccattcagtatcataagatgactcacactggagagaaaccctatgaatgtaagcagtgtgggaaagcctttagatgtggctcacaccttcaaaagcatggaaggactcacactggagagaaaccctatgaatgtaggcaatgtggtaaagccttcagatgtacctcggaccttcaaaggcatgaaaagacacacactgaggataaaccctatggatgtaagcagtgtgggaaaggctttagatgtgcttcacaacttcaaattcatgaaaggacgcacagtggagagaaaccccatgaatgtaaggaatgtggaaaagtattcaagtatttttcttccttgcgtatacatgaaaggacgcacactggagagaagccccatgaatgtaagcaatgtggaaaagcattcaggtatttctcttccttgcatatacatgaaaggacacacactggagataagccatatgagtgtaaggtatgtggcaaagccttcacttgttccagttccattcgatatcatgaaaggactcacactggagagaaaccctatgaatgtaagcactgtggtaaggcctttatttccaattacattcgatatcatgaaaggactcacactggagagaaaccctatcaatgcaagcaatgtggcaaagcctttattcgtgccagttcatgtcgagaacatgaaagaactcataccattaatagatgagaaatccttttagtggaagcaacgggagaagctttctgttgtcccacttcctttgaaacacaagaaaagagagtggtgaaagaacctctggataactgctttttgaattgaggagagagacttgcgataggacaataaaat

SEQ ID NO: 134 - DNA, 1927 bp, Homo sapiens
  misc_feature: Incyte ID No: 1395322CB1
gagtcgaaggactagaatgagatcactgaactcatttcacttgttgcttacggtacagtccagcatgagctggaaatgtaggaacctcagcctcccgagcagaaagaatctttgaccatcagtctgtgacctgccccttctctttacatgcagccgctctctgctccctgccccaatgaacatctgcactaggcccaagccttggagtaatttacctgaagagtgacaccattgattttgaaactactgaagaaacccaagacagctgaaaaccagaaggcatctgaggagaatgagattactcagccgggtggatcacacgcatccatgagcgctcgcagcagatggagcgctacctgtccaccacccccgagaccacgcactgccgcaagcagccccggcctgtgcgcatccagaccctagtgggcaacatccacatcaagcaggagatggaggacgattacgactactacgggcagcaaagggtgcagatcctggaacgcaacgaatccgaggagtgcacggaagacacagaccaggccgagggcaccgagagtgagcccaaaggtgaaagcttcgactcgggcgtcagctcctccataggcaccgagcctgactcggtggagcagcagtttgggcctggggcggcgcgggacagccaggctgaacccacccaacccgagcaggctgcagaagcccccgctgagggtggtccgcagacaaaccagctagaaacaggtgcttcctctccggagagaagcaatgaagtggagatggacagcactgttatcactgtcagcaacagctccgacaagagcgtcctacaacagccttcggtcaacacgtccatcgggcagccattgccaagtacccagctctacttacgccagacagaaaccctcaccagcaacctgaggatgcctctgaccttgaccagcaacacgcaggtcattggcacagctggcaacacctacctgccagccctcttcactacccagcccgcgggcagtggccccaagcctttcctcttcagcctgccacagcccctggcaggccagcagacccagtttgtgacagtgtcccagcccggtctgtcgacctttactgcacagctgccagcgccacagcccctggcctcatccgcaggccacagcacagccagtgggcaaggcgaaaaaaagccttatgagtgcactctctgcaacaagactttcaccgccaaacagaactacgtcaagcacatgttcgtacacacaggtgagaagccccaccaatgcagcatctgttggcgctccttctccttaaaggattaccttatcaagctcatggtgacacacacaggagtgagggcataccagtgtagtatctgcaacaagcgcttcacccagaagagctccctcaacgtgcacatgcgcctccaccggggagagaagtcctacgagtgctacatctgcaaaaagaagttctctcacaagaccctcctggagcgacacgtggccctgcacagtgccagcaatgggaccccccctgcaggcacacccccaggtgcccgcgctggccccccaggcgtggtggcctgcacggaggggaccacttacgtctgctccgtctgcccagcaaagtttgaccaaatcgagcagttcaacgaccacatgaggatgcatgtgtctgacggataagtagtatctttctctctttcttatgaacaaaacaaaacaacaacaaaaaacaaacaaacaaaaaagctatggcactagaatttaagaaatgttttggtttcatttttactttctgtttttgtttttgtttcgtttcattttgtactacatgaagaactgttttttgcctgctggtacattacatttccggaggcttgggtgaataatagttttcccagtctccctcggatggtggccttaaggcctgg

SEQ ID NO: 135 - DNA, 1895 bp, Homo sapiens
  misc_feature: Incyte ID No: 1419370CB1
cggcgctgacgagaggctttcttgggggcctcagagctggggaagaaaggaggaagtcctggtcagctgagtggaaatagaaggatttctgctgccatcatcttccatgggctttccaggtcacacgacctacaagtagggagcagggaaagaagagtgagcctgcatgccaattctaagctcttcaggatcaaatgtcgttcgtcctgtccagaatggcagcctgtggaggcacctgcaagaacaaagtgactgtgtccaagcccgtgtgggacttcctgagcaaagagaccccagcccggctggcccggcttcgggaggagcaccgtgtgtccatcctcatagatggcgagacttctgacatctatgttctccagctttccccacagggtcctcccccggcccctccaaatgggctctacctagcccggaaggctctcaaggggctgctaaaagaggcagagaaagagctgaagaaagctcagaggcagggggagctgatgggctgcctggctctggggggtggaggggagcaccctgagatgcaccgcgcaggcccaccccctctccgagcagccccacttctgcccccaggagctcgggggctcccccctcctcctccccccctgcccccacctcttcctcctcgccttcgggaggaggcagaagagcaggagagcacctgccccatctgtctgggggagatccagaatgccaagacattggagaagtgccggcattcattctgcgagggctgcatcacccgggctctgcaggtgaaaaaggcctgccccatgtgcggccgcttctatgggcagctggtgggcaaccagccccagaatgggcggatgctggtctctaaggacgccaccctcctactgcccagctatgagaagtacggcaccattgtcatccagtacgtcttcccgcccggtgtccagggggctgaacacccaaacccaggagttcggtatcctggcaccacacgggtggcctacctcccggactgccctgagggcaacaaggtgctgaccctgttccgcaaggcgtttgaccagcgtctcaccttcactatcggcacgtccatgaccacagggagaccgaatgtcatcacctggaacgacatccaccacaagaccagctgcacagggggaccccagctgtttgggtacccagaccccacctacctgacccgggtgcaagaggagctgagagcgaagggtatcacagatgactgaaggacatcgcctttgccaaggcccctgctgtctgcctctactaggacccagcagaagcctctttctcctctctgccccctgccccccacaccacacctgtaggggacctgtctgactgggaagggagttccgagagggagggggcaatcccttcccccatcccccactggccaagtgtttcaatgcagtgtgagccactcccttctggcagaggccgacctccaaggctctgttctcccctccccgtgtacatatactcccggtttccctgcccctccattgcccttggctttttctggtatgtgctgtgctccacgaccaagccgagaaaggacctagggtggggaagggagggtctcttgattcctaaccgcccccacatactgctccaccgctgaacttcgggtgccggggaggagaaattgggctgatgtgagctccccgtcacccgccatggagccggctgtgtgtgttcatcagatacagttctcccttaaccttgtcctttctctcctgtgtctcagtctccgtcagtctgtctttctccgctcttctctgacccctgtgaggaacctccttaccctgttctggaatcgctgccagactgtagcttttaatttaataaaaataaagtaaaatatgcaactcttaaaaaaa

SEQ ID NO: 136 - DNA, 2837 bp, Homo sapiens
  misc_feature: Incyte ID No: 1429773CB1
ttgacgtaggggaaatcatgcagccatcaggacacaggctccgggacgtcgagcatcatcctctcctggctgaaaatgacaactatgactcttcatcgtcctcctcctccgaggctgacgtggctgaccgggtctggttcatccgtgacggctgcggcatgatctgtgctgtcatgacgtggcttctggtcgcctatgcagacttcgtggtgactttcgtcatgctgctgccttccaaagacttctggtactctgtggtcaacggggtcatctttaactgcttggccgtgcttgccctgtcatcccacctgagaaccatgctcaccgaccctggggcagtacccaaaggaaacgctacgaaagaatacatggagagcttgcagctgaagcccggggaagtcatctacaagtgccccaagtgctgctgtattaaacccgagcgcgcccaccactgcagtatttgcaaaagatgtattcggaaaatggatcatcactgcccgtgggtgaacaattgtgtaggagaaaagaatcaaagattttttgtgctcttcactatgtatatagctctgtcttcagtccatgctctgatcctttgtggatttcagttcatctcctgtgtccgagggcagtggactgaatgcagtgatttttcacctccgataactgtaatcctgttgatcttcctgtgccttgagggtcttctgtttttcactttcactgcagttatgtttggcacccaaatccactccatatgcaacgacgagacggagatcgagcgattgaaaagtgagaagcccacatgggagcggaggctgcgatgggaagggatgaagtccgtctttggggggcccccctcactcctctggatgaatccctttgtgggcttccgatttaggcgactgcccacgagacccagaaaaggcggcccggagttctcagtgtgaggcgtggctcatcagactgaaacttgctcacagacttccagttatttatttggggtctgaaggatatcaacagctcatctgtgaccaacagggcaactggaacctacacaaaccaattgcttgcagcaagcagagttttatatatttatagtcacagatggcagaggaagaggctctcagtccccacctgtacaacaacggaaaggtgtgtggccacacgaagaagccaaacgccgtggcctcctgcagagctggggcttctgtggagaatacttcgggttattacatgggttattcaaatcctgggtcctgagctgctgtttccaatcatgaagaaaaacagtgaatccagtgaacagggattctccaagcagtcatttcagggggctcctgctgaccccgccactcagcagtgcactccccggatcacagcagggcgtttacatagaaagacgttttggtctcgattagctccgatgctttgcgctgaagttgcaaaagatctgtgcactgaacagtgaaggtggcttccggcacactccccgctgccccggaagagacatcctttgaccctctcagcaagtctgtgtgtgtgcgtgtctgtgcgtgtgcgcgcgtgtgtgcatgtgtgtcaaaattgccagtgttgtttaggcaatgtaacatttaccggctgtgtacagcaaacaagctattttttagaaaccgacgtttcagggaagaggggagagagccgcggggtcctgcccgtggttactatgaatgtattgctgttggaggacatctcgatccaaagaacagccgttcctgtgcggcccttcgttgccctcctgctttcattttttaaagaaatcttgagtgcttgagggccttggaactgatttttttttttttgttccagccaaattagcagtgtataaatggcacctaggtaagagcagagctgcggctcggtgacttgatacttggggcagcccgatgctgtgtgtggggcaggggaggcatccttactggagaggcagggcccagccattgggcacctctgggaaggggaggggaccatgaggcagccagcccctggcaggggcgactgtgccaccgcaggcagcgctccagtcgggaatggccaggatggcgccctcttgttggagtttttggttagcttttacgttttcttctccacccacggcacaggtgataaaataggatccttggtgcggagcttaaaattatgccagaaagccaacagctcccctcgtggggccttgccttaaacttgcctggtttgtacattttttgccggacgcatcaagaagcaatctgtgacaaagtctgagggtcttcctttatgcttgccctccacactaagagaagttggcgtctccctcctgggaattgttttgcctttctgttcatctgtgaactgttttttgtttttaattactctgtaccccatccgaatcagggcttctaccactgctgatgcaaaaccacaaagggacctacctgagccaccgtcctagccaagcgagcaaacctgcagggggtttggaagtggacttggtcaccgcagaagcgtgtgcgccgttgggggaagagctgcgtcacagccagagggacaaagtgtgggtgatcctggagacgccagtttccgagattgttctgcatattcatttgcacattgttgtctgggttggacatgcgtgtgggcttcagtgtgaggcttttaatatgtatatcctgttatcaataaaacaattatccaagtggttgaatcctgtgagacttggcaagtgtgtgcaaatcaagtatacttgacttttcaacctcttctttcaatgtaacttttatatgaaataaagtaatcaattaacagttctcaaaaaaaaaaaa

SEQ ID NO: 137 - DNA, 1180 bp, Homo sapiens
  misc_feature: Incyte ID No: 1470820CB1
ggcccagcttcaaaagctaaacagaagatgacttcatactttgttctgctaccttcttggattacttctgtggaagcctcgaaaaattataaaaaatgccactccatgatcttgttgaagacatttctgagtttgtacctcttggactctgaaaaagtgtagtcacgctatggggggaaaagcaaaacagtgagattttggttagcccacaaaactgtgaaatctgtaaactgccattttttgttttttgagaaaaaaagcagtacagaggaaaagatgccattccaaatatttttatgttctaatagtggagctaaatgcatattttaatattgcaagagtcctgacaccatagacctttggatgtaaatgtgttatatttatccttttgtgttcctaaggttggactccatgaaagaattgcacaaaacaaatcgacagcagcatgagaaacatctgcaaagccgagtggactctaccagggctattgaaagattagaagggtcttctgggggtattggtgaacggtataaatttttgcaagaaatgcgagggtatgtccaagacttgcttgagtgtttcagtgaaaaggtaagaatgcaaaaatactaatctctttgaataaggcaaaattagggaggtctagatggccttgtgtagaacattctataattctcagaaagtacccactgaactcaacattagaagtgatgaaaagtcatgcttcatttttcttcacttcattagtggcattatctcttaagggcaatataatacctttgttgaaaacagaaataaagataatatcttaaagcacatttaaataagactttggaaagtcttatttcaatatggtggtagattattattggcctgtgctgaattcttagaatataagggactcatctgataaaattttcttttctggttcaggtttaaacttatttttaaacgtttctacaagcaattctaaatatgcatataaagttgcaaatttttattagttttttttttttttttttttttaccctggatgatgattaccattgttgctaatagtttttatctaagtaagcctatgcttgatttctttcagaaaccatttcattggatatcattttttctaaggtttcatttctcccaagtttgtttttttcaataggatagtcagttgacaaaa

SEQ ID NO: 138 - DNA, 2538 bp, Homo sapiens
  misc_feature: Incyte ID No: 1483455CB1
cccaggctccgggacgattctcggcagtgtcgtccccagaggtcggcggccgttgcccgctcaccagcgacgcggggcgcctgctgggacggacactgcccatctctaagataagagcctggaaagaggactctgttggctgttggaaattgcagagtaatgcctcaggtgacatttaatgatgtggctatagacttcactcatgaagagtggggatggctcagttctgctcagagggacttatacaaggatgtgatggtccagaattatgagaacctggtctctgtaggtctttctgtaactaagccatatgtgatcacgttattggaggatggaaaagagccctggatgatggagaaaaaactgtcaaaaggtatgattccagattgggaatcaagatgggaaaacaaggaattatcaacaaagaaggataattatgatgaagattcaccccaaacagtaataatagaaaaagttgtaaaacaaagttatgaattttcaaattctaagaagaatttggaatatatagagaagttggaagggaagcatggaagtcaggtagaccatttcagaccagcaattctcacctctagagaaagccccactgcagacagtgtttacaaatacaatatatttagaagcacctttcattcaaagtctactctttctgaaccacaaaaaatttctgctgaagggaattcacacaaatatgatatattaaagaagaacttaccaaaaaagtcagttataaaaaatgagaaagtcaatggtggaaagaaacttttgaattctaataaaagtggggcagccttcagccagggcaaatctcttacccttccccagacttgtaatagagagaaaatctatacatgcagtgaatgtgggaaagcctttggcaaacagtcaatcctcaatcgccactggagaattcatacaggagagaagccctatgaatgtcgtgaatgtgggaagacttttagccatggctcatcccttacacgacatctgataagccatagtggagagaaaccttacaaatgtattgaatgtgggaaggcctttagccatgtctcatcacttactaaccatcagagcactcacactggagagaaaccatatgaatgtatgaactgtggaaagtcttttagtcgtgtgtcccatcttattgaacatctaagaattcatactcaagaaaaactctatgagtgtcgtatatgtggaaaggccttcattcataggtcatctctcattcaccatcagaaaatccatactggagagaagccttatgaatgtagagaatgtgggaaagctttctgctgtagctcacaccttactcgacatcaaagaattcacactatggagaaacaatatgaatgcaacaaatgtctgaaagtctttagtagcctctcatttcttgttcagcatcagagtattcatactgaagaaaaaccctttgaatgtcagaaatgcaggaaatccttcaaccagcttgaatcactgaatatgcatttgagaaatcacattagattgaaaccctacgaatgcagtatatgtgggaaagcctttagtcataggtcatccctgcttcaacatcacagaattcatactggagagaaaccttatgaatgtattaaatgtgggaagaccttcagctgtagttcaaaccttaccgtacatcagagaattcacactggagaaaagccatataaatgtaatgagtgtgggaaagcttttagcaaaggctcaaatcttactgcccatcaaagagtacataatggagagaaacccaatagtgtggtaagtgtggaaaagcctttagactatatgaatcactatacatgtgagaaatcttacagaagagaaactgtatgaagcagtggttatcatggtaaatttcctagattctcccttatttaacattagaaaaatttatactggggaaagcctttgtcagtattaatcccttaattgacataagtatactcacactaggataaaaccctgtacatgtagcaaatgtgggaaagactatagacaataggaatcttttacaaactcctacaggagagaagctgtatgaatgtagaaaatttagaaattgagggaagtcttcagttccaagtatatcccttattctacagcagagaactcaaaatggagagaaatctcatttaagagatgtagcaaagtgttcactaagagtgtttatcttggtacacatcagaagattaatggtagaacaacctgaaggatttaggagttatgtgtaaatctttgcagtcatgctatttgtaaactggattctacaggagagcaaataaacattataataaaatatgcatttcttagagcagtagcttgcagtttcagttgagttctacttagaaattctttttagctagtgggcatgtgaagatatttagtcacccagaggagccagtaagtgttataatattgaaaattaaagctgcaaaagaaataaagtgatgttaataaaagttttggcatctaataaaatcattttgtatatcaaaaaaa

SEQ ID NO: 139 - DNA, 1678 bp, Homo sapiens
  misc_feature: Incyte ID No: 1527064CB1
gacgcctcttcagttgtctgctactcagaggaaggggcggttggtgcggcctccattgttcgtgttttaaggcgccatgaggggtgacagaggccgtggtcgtggtgggcgctttggttccagaggaggcccaggaggagggttcaggccctttgtaccacatatcccatttgacttctatttgtgtgaaatggcctttccccgggtcaagccagcacctgatgaaacttccttcagtgaggccttgctgaagaggaatcaggacctggctcccaattctgctgaacaggcatctatcctttctctggtgacaaaaataaacaatgtgattgataatctgattgtggctccagggacatttgaagtgcaaattgaagaagttcgacaggtgggatcctataaaaaggggacaatgactacaggacacaatgtggctgacctggtggtgatactcaagattctgccaacgttggaagctgttgctgccctggggaacaaagtcgtggaaagcctaagagcacaggatccttctgaagttttaaccatgctgaccaacgaaactggctttgaaatcagttcttctgatgctacagtgaagattctcattacaacagtgccacccaatcttcgaaaactggatccagaactccatttggatatcaaagtattgcagagtgccttagcagccatccgacatgcccgctggttcgaggaaaatgcttctcagtccacagttaaagttctcatcagactactgaaggacttgaggattcgttttcctggctttgagcccctcacaccctggatccttgacctactaggccattatgctgtgatgaacaaccccaccagacagcctttggccctaaacgttgcatacaggcgctgcttgcagattctggctgcaggactgttcctgccaggttcagtgggtatcactgacccctgtgagagtggcaactttagagtacacacagtcatgaccctagaacagcaggacatggtctgctatacagctcagactctcgtccgaatcctctcacatggtggctttaggaagatccttggccaggagggtgatgccagctatcttgcttctgaaatatctacctgggatggagtgatagtaacaccttcagaaaaggcttatgagaagccaccagagaagaaggaaggagaggaagaagaggagaatacagaagaaccacctcaaggagaggaagaagaaagcatggaaactcaggagtgacattcccttcactccttttcctacccaagggggaagactggagcctaagctgcctgctactgggctttacatggtgacagacatttccgtgggatagggaagatagcaggaagaaaagtaaactccatagaagtgtcattccactgggttttgatattggcttagctgccagtctcccatttgtgacctatgccatccatctataatggaggataccaacatttcttcctaatattctataatctccaactcctgaaaacccctctctcaactaatactttgctgttgaaatgttgtgaaatgttaagtgtctggaaatttttttttctaagaaaaactattaaagtacttcctagtagggctcttggtctttctggttggtgtttttttgtttgtttgtttttttgcatgtggcaaccttttttgctt

SEQ ID NO: 140 - DNA, 2060 bp, Homo sapiens
  misc_feature: Incyte ID No: 1557491CB1
cgagaaaacagtcaaatgaatgagtctgcacctggtacctatgttgttcagaatccacacagctctgaattaccaacgctgaatttccaagatactgtaaacaccctgaccaacagtccagccatcccattggaaacatctgcatgtcaggacatacccacttctgccaatgtacaaaatgcagagggtaccaaatggggagaggaggcattgaaaatggatcttgacaataacttttattcaactgaggtgtcagtttcttccactgaaaatgctgtcagttctgacctccgggcaggggatgtacctgttttatctttgagtaatagcagtgagaatgccgcctctgtgatcagctacagtggctctgcaccctcggtcattgtacacagcagccagttttcatcggtgatcatgcacagcaatgccattgctgccatgaccagcagcaaccacagagccttttcagacccagctgtcagtcagtccctgaaagatgacagtaagcccgagccagataaagtgggtaggtttgcaagcagacccaaaagcattaaggagaaaaagaaaactacatcacataccaggggagaaataccggaggagtcaaactatgttgctgatcctggaggatcactgagcaaaaccacaaatattgctgaagaaaccagcaaaattgaaacctacattgcaaaacctgctctgccgggaacctccacaaatagtaatgttgcacccctttgccaaataacagtgaaaattggaaacgaagccattgtgaaaaggcacattctaggatctaaattgttttataaaagagggagaagacccaagtatcagatgcaggaggagcctttgccacaggggaatgacccagaacccagtggagacagcccactcgggctttgccaatccgagtgcatggagatgagtgaagtgttcgatgacgcaagtgaccaggattccactgacaaaccgtggcgcccttactacaactacaaacccaaaaagaaatccagacagttgaaaaaaatgaggaaagtcaactggaggaaggagcacggaaacaggagcccgagccataaatgtaaatacccagcagaactggattgcgccgtggggaaggctcctcaggataaaccctttgaggaagaagaaactaaagagatgcccaagctgcagtgtgaactctgtgatggagacaaagcagtgggggctggaaaccaaggaaggccccaccgacatcttacttctcggccatatgcctgcgagctctgcgccaagcagttccagagcccttccacactcaaaatgcacatgagatgtcacaccggggagaagccataccagtgcaagacctgcggacggtgcttttcggtgcaaggaaacttacagaaacatgaacgcatccacctgggcttgaaggagttcgtctgtcagtattgcaacaaggcattcaccttgaatgagaccctcaaaatccatgaaagaatccatactggagaaaagcgttaccactgtcagttctgctttcagagatttttgtatctctccaccaaaaggaatcacgagcagaggcatattcgggagcataatgggaagggctatgcctgcttccagtgccccaaaatttgcaaaacagctgctgcccttggaatgcaccaaaagaaacacttattcaaaagcccaagtcagcaggagaaaataggtgacgtgtgccacgaaaactcaaatcccttggagaatcaacatttcattggttcagaagacaatgaccaaaaggataacatacaaaccggtgtggaaaatgttgtcctttgagtggcaagaattagaaaaatcttcaaaaatatagttggtggtttttttagttatgatttaagtttagtttcattttgtccatgtgacagtcatgaaggagtgaaattaaaaaaaaaaaaaactcatttgtgaaaattccagaaaaaggatcctaatatctactttgggttttagcattaactttatgcaaagtgcacaaaaacaaaatagctgactcctccatatcccagtttcttgtg

SEQ ID NO: 141 - DNA, 3270 bp, Homo sapiens
  misc_feature: Incyte ID No: 1576862CB1
aactacatttatttctcctataagcaaatgtgttcacaacattccatcggggaatcttcttaattgtcacataaatgtcatcttatgtaaattgaatatttatcttcccatggaagggggtggaggggaaaggaagaataaacaatcttcagtcttggagagggaaggcgactccggtgtccattcacaactcacccacgtgccttcaaagccaaaggtgagctgaaaaattattggataatctgaggggcagccgaccatgagggggaagaaaaagttggccacgatgctttggggatgttgggccaggctccccacaacctcctcccgaggccagacccaccccctccccagctagaggcattccgaggaggttggagcttgacccccgattcctccccaaccaggaggccagtccttctccttcctcgagagaaggtgagctcggcgggcgcagcgggttgggtgggtgtggcccgcggctccgggaacagacccaaggccccgccaccgccggctagcagcccgacagcccgcccgcctggcgagcgcaggctcttcttccagaaactgcgaggatccgagcgcactgtttgtgcaccacaagatggaagagaagaggcgaaaatactccatcagcagtgacaactctgacaccactgacagtcatgcgacatctacatccgcatcaagatgctccaaactgcccagcagcaccaagtcgggctggccccgacagaacgaaaagaagccctccgaggttttccggacagacttgatcacagccatgaagatcccggactcataccagctcagcccggatgactactacatcctggcagacccatggcgacaggaatgggagaaaggtgtgcaggtgcctgccggggcagaggccatcccagagcccgtggtgaggatcctcccaccactggaaggcccccctgcccaggcatccccgagcagcaccatgcttggtgagggctcccagcctgattggccagggggcagccgctatgacttggacgagattgatgcctactggctggagctcatcaactcggagcttaaggagatggagaggccggagctggacgagctgacattagagcgtgtgctggaggagctggagaccctgtgccaccagaatatggccagggccattgagacgcaggaggggctgggcatcgagtacgacgaggatgttgtctgcgacgtgtgtcgctctcctgagggcgaggatggcaacgagatggtcttctgtgacaagtgcaacgtctgtgtgcatcaggcatgctacgggatcctcaaggtgcccacgggcagctggctgtgccggacgtgtgccctgggtgtccagccaaagtgcctgctctgccccaagcgaggaggagccttgaagcccactagaagtgggaccaagtgggtgcatgtcagctgtgccctatggattcctgaggtcagcatcggctgcccagagaagatggagcccatcaccaagatctcgcatatcccagccagccgctgggctctgtcctgcagcctctgcaaggaatgcacaggcacctgcatccagtgttccatgccttcctgcgtcacagcgttccatgtcacatgcgcctttgaccacggcctggaaatgcggactatattagcagacaacgatgaggtcaagttcaagtcattctgccaggagcacagtgacgggggcccacgtaatgagcccacatctgagcccacggaacccagccaggctggcgaggacctggaaaaggtgaccctgcgcaagcagcggctgcagcagctagaggaggacttctacgagctggtggagccggctgaggtggctgagcggctggacctggctgaggcactggtcgacttcatctaccagtactggaagctgaagaggaaagccaatgccaaccagccgctgctgacccccaagaccgacgaggtggacaacctggcccagcaggagcaggacgtcctctaccgccgcctgaagctcttcacccatctgcggcaggacctagagagggttagaaatctgtgctacatggtgacaaggcgcgagagaacgaaacacgccatctgcaaactccaggagcagatattccacctgcagatgaaacttattgaacaggatctgtgtcgagagcggtctgggaggagagcaaagggcaagaagagtgactcgaagaggaagggctgcgagggctccaagggcagcactgagaagaaagagaaagtgaaggcggggcctgactcagtcctggggcagctggcaggcctgtccacctcattccccatcgatggcaccttcttcaacagctggctggcacagtcggtgcagatcacagcagagaacatggccatgagcgagtggccactgaacaatgggcaccgcgaggaccctgctccagggctgctgtcagaggaactgctgcaggacgaggagacactgctcagcttcatgcgggacccctcgctgcgacctggtgaccctgctaggaaggcccgaggccgcacccgcctgcctgccaagaagaaaccaccaccaccaccaccgcaggacgggcctggttcacggacgactccagacaaagcccccaagaagacctggggccaggatgcaggcagtggcaaggggggtcaagggccacctaccaggaagccaccacgtcggacatcttctcacttgccgtccagccctgcagccggggactgtcccatcctagccacccctgaaagccccccgccactggcccctgagaccccggacgaggcagcctcagtagctgctgactcagatgtccaagtgcctggccctgcagcaagccctaagcctttgggccggctccggccaccccgcgagagcaaggtaacccggagattgccgggtgccaggcctgatgctgggatgggaccaccttcagctgtggctgagaggcccaaggtcagcctgcattttgacactgagactgatggctacttctctgatggggagatgagcgactcagatgtagaggccgaggacggtggggtgcagcggggtccccgggaggcaggggcagaggaggtggtccgcatgggcgtactggcctcctaactcacccccttccctgtcccaggccctgccctggtccccccacaaggcctcagcccagtcacaactgccatttccagtctctgctgagtgtcccagaccctcgaggctgccactccgtcgtggttttatttttaatatagagagagttttgaattcta

SEQ ID NO: 142 - DNA, 1907 bp, Homo sapiens
  misc_feature: Incyte ID No: 1609731CB1
cagagataagagaacgccattctgtccgtggccgatctagctctggactacaattcccagagcccacagcggcctgacgttacgtcgttcttgacgtcgtggcgagctagttagctccgcaaggacccggacgcgaccaggggaggcagaaggactctgcacttgtccaagagaagaatccagagaaatcagagcaggtcaaatagttctaaaagccatggcccagggactggtgacattcagggacgtggccatagagttctctctggaagaatggaagtgcctggaacctgctcagagggacttgtacagggaggtgactctggagaactttggtcacttggcctcactaggactctccatttctaagcctgatgtcgtctccttattggagcaagggaaagagccctggatgattgcaaatgatgtgacaggaccatggtgcccagacttggagtccaggtgtgagaaatttctacaaaaagacatttttgaaatcggggcattcaactgggagataatggaaagccttaaatgcagtgacctggagggctccgattttagagctgactgggaatgcgaaggccagtttgagagacaagtcaatgaagagtgctattttaagcaagtgaacgtcacctatggacatatgcccgtgttccagcatcacacgtctcacactgtacgtcagagcagggagactggtgagaaactgatggaatgtcatgaatgtgggaaagcatttagccgtggctcacaccttattcaacatcagaaaactcacactggtgaaaaaccctttggatgtaaggaatgtgggaaggccttcagccgtgcctcacaccttgttcagcatcagagaattcacacgggtgagaaaccttatgactgtaaggactgtgggaaggcctttggtcgtacatcagaacttattctacatcagagacttcatactggtgtcaaaccttatgaatgtaaagaatgtgggaagacctttaggcagcattcacagctgattctgcatcaaagaactcacacaggcgagaaaccctacgtatgtaaagactgtggcaaggctttcattcgtggctcccaactcactgtgcatcggagaatccacacaggggccagaccctatgagtgtaaagaatgcgggaaagcctttagacagcactcacagctgactgtacaccagcgaatccacactggtgagaaaccctacgagtgtaaggaatgcggaaagggctttattcacagctcagaagttactcgacatcaaaggaattcattctggggagaaccctatgagtgtaaggaatgtgggaaggccttcagacagcacgcacagctcacacgacatcagagagtccatactggcgacagaccctatgaatgtaaggactgcgggaaggcatttagtcgtagctcatacctcattcaacatcaaagaattcatacaggtgacaaaccctacgaatgtaaggaatgtgggaaggcctttattcgtgtttcacaactgactcatcatcagcgaattcacacttgtgagaaaccctatgaatgcagggagtgtggaatggcctttattcgtagttcacaacttaccgaacatcagagaattcatcctggtatcaaaccttacgaatgtagagagtgtgggcaggcatttattcttggctcacaactcattgaacactacagaattcatactggttagaaagccttgagtgtaagggataaagataagcctttatgtggagttcacatctggctcagtactaggtaatttttaatgtagtgtaattaatgtcagaaaacacctgtcacttccatcatagaacatcagaaaactcacacccaaagaaaattaaataaatgtgggaattctttttgcctcaaaaaaaaaa

SEQ ID NO: 143 - DNA, 1800 bp, Homo sapiens
  misc_feature: Incyte ID No: 1674538CB1
gcggccgccaggaagcccagattcgagtgtccggagagtaaccggaagtgctgtccccaggcctaggggcggcgccggcggctgccagggagaggcaagaattgagtgttgtgaatagttctgaactagagaccttttgaaaccaaaaggaagatggtcttgagtctttcttgttacgaatgctatcttctttgagaagtcaaattgtcaggatcaggaatgtatgttttcttccatctggattctagggttggaaataccaagtaaggaattaacatatatgatgctggaaacttgtagaggctcatgattgaaaggcctgaaacagatgtatcttccaagttcttatcaagaaaatgactgtgagggcaacgatgggtcaagaagaccagcggaaaactccctaggagagagccatagaaaatgtacacttcagaagagaaatgtaatcagagaactcaaaaaaggaaaatatataatgtatgccctcggaagggtaaaaagatttttattcatatgcatgagattattcagatagatggtcatatataccagtgccttgaatgcaagcaaaacttctgtgaaaacttagctcttattatgtgtgagagaacccatactggggagaaaccttataaatgtgatatgtgtgagaaaacctttgtccaaagctcagatcttacttcacaccagaggatccacaattacgagaaaccttataaatgtagcaaatgtgagaagagcttttggcatcacttagcgctttcaggacatcagagaacacatgcaggtaaaaaattctatacatgtgacatttgtggcaagaattttggtcagagttctgatctgcttgtccaccagcgaagccatactggcgagaaaccatatctatgtagtgagtgtgacaaatgcttcagtagaagtacaaacctcataaggcatcgaagaactcacacaggtgagaaaccatttaagtgtctcgagtgtgaaaaagcttttagtgggaaatcagatcttattagccaccagagaactcacactggggaaaggccctacaaatgtaataagtgtgagaaaagttaccgacaccgttcagccttcattgtacataaaagagttcatactggggagaagccctataagtgtggtgcctgtgaaaaatgctttggccagaaatcagaccttatcgtgcaccagagagtccacacaggtgagaagccgtataaatgcctggaatgtatgagaagttttactcggagtgccaacctaattaggcaccaggcaactcacactcacacttttaaatgccttgaatatgaaaaaagctttaactgtagctcagatcttattgtacatcagagaattcacatggaagagaaaccacatcagtggtctgcgtgtgagagtggcttcctcctaggaatggactttgttgcccaacagaaaatgagaactcaaacagaggagctacactataaatacactgtatgtgataaaagcttccaccagagttcagcccttcttcaacatcagacagtacacattggtgaaaaaccgtttgtctgtaatgtgagtgaaaaaggtcttgagcttagccctccccatgcgtcagaagcctcacagatgtcttgaccaggcgagaagctgtaataccaatattaaaaattatttatgtatcagagaactcattaagatgaggacaaatctcagactttgctcagagctcagaattcagtggggaccagagagcctgcaattggaaatatgagaaattctttgcccagagagctgccctaacag

SEQ ID NO: 144 - DNA, 1848 bp, Homo sapiens
  misc_feature: Incyte ID No: 1675287CB1
agctagtgagcatgatccgggaaggggaagccgcaggtgcctgtccagaggagatcttctcggctctgcagtactcgggcactgaggtgcctctgcagtggttgcgctcagaactgccctacgtcctggagatggtggctgagctggctggacagcaggaccctgggctgggtgccttttcctgtcaggaggcccggagagcctggctggatcgtcatggcaaccttgatgaagctgtggaggagtgtgtgaggaccaggcgaaggaaggtgcaggagctccagtctctaggctttgggcctgaggaggggtctctccaggcattgttccagcacggaggtgatgtgtcacgggccctgactgagctacagcgccaacgcctagagcccttccgccagcgcctctgggacagtggccctgagcccaccccttcctgggatgggccagacaagcagagcctggtcaggcggcttttggcagtctacgcactccccagctggggccgggcagagctggcactgtcactgctgcaggagacacccaggaactatgagttgggggatgtggtagaagctgtgaggcacagccaggaccgggccttcctgcgccgcttgcttgcccaggagtgtgccgtgtgtggctgggccctgccccacaaccggatgcaggccctgacttcctgtgagtgcaccatctgtcctgactgcttccgccagcacttcaccatcgccttgaaggagaagcacatcacagacatggtgtgccctgcctgtggccgccccgacctcaccgatgacacacagttgctcagctacttctctacccttgacatccagcttcgcgagagcctagagccagatgcctatgcgttgttccataagaagctgaccgagggtgtgctgatgcgggaccccaagttcttgtggtgtgcccagtgctcctttggcttcatatatgagcgtgagcagctggaggcaacttgtccccagtgtcaccagaccttctgtgtgcgctgcaagcgccagtgggaggagcagcaccgaggtcggagctgtgaggacttccagaactggaaacgcatgaacgacccagaataccaggcccagggcctagcaatgtatcttcaggaaaacggcattgactgccccaaatgcaagttctcgtacgccctggcccgaggaggctgcatgcactttcactgtacccagtgccgccaccagttctgcagcggctgctacaatgccttttacgccaagaataaatgtccagagcctaactgcagggtgaaaaagtccctgcacggccaccaccctcgagactgcctcttctacctgcgggactggactgctctccggcttcagaagctgctacaggacaataacgtcatgtttaatacagagcctccagctggggcccgggcagtccctggaggcggctgccgagtgatagagcagaaggaggttcccaatgggctcagggacgaagcttgtggcaaggaaactccagctggctatgccggcctgtgccaggcacactacaaagagtatcttgtgagcctcatcaatgcccactcgctggacccagccaccttgtatgaggtggaagagctggagacggccactgagcgctacctgcacgtacgcccccagcctttggctggagaggatccccctgcttaccaggcccgcttgttacagaagctgacagaagaggtacccttgggacagagtatcccccgcaggcggaagtagctgagggcaagggtcccgatgagggtcccatggcctgctccctcaggaacagctccagcaccaataaagaggcatcttaccacccaaaaaaaaaaaa

SEQ ID NO: 145 - DNA, 2056 bp, Homo sapiens
  misc_feature: Incyte ID No: 1693903CB1
gtttgcggggccaatgagcgactcgctttccgtgcggtgcggcgagtgaggctccggtcttcctcctcgtcctgccgcagggccagaacccctgacggtattcagctgcgcgtaagtctggccggtgccatctgtctccgcaatgccccccaagaaacaggctcaggccgggggcagcaaaaaggcggagcaaaaaaagaaggagaagattatcgaagacaaaactttcggtttgaagaataagaaaggagcaaagcaacagaagtttatcaaggctgtcacacatcaagttaaatttggtcaacaaaatccacgtcaggtagcacagagtgaagctgaaaagaaattgaagaaggatgacaagaagaaagaattgcaggagctaaatgagctgttcaaacctgtagttgctgctcaaaaaataagtaaaggtgcagatcccaagtctgtagtatgtgcattcttcaagcaaggacagtgtactaaaggagataagtgtaagttctcccatgacttgactctggagagaaaatgtgaaaagcgaagtgtttacattgatgcaagagatgaagaacttgaaaaagatactatggataattgggatgagaaaaagctggaagaagtagtgaacaagaagcacggtgaggcggaaaagaaaaaaccaaaaactcaaatagtgtgcaagcatttcctggaagctattgaaaacaacaagtatggctggttttgggtatgccctggagggggtgatatttgcatgtatcgtcatgcacttcctcctggatttgtgttgaaaaaagataaaaagaaagaagagaaagaagatgaaatttcattagaagatctaattgagagagagcgttctgccctaggtccaaatgttaccaaaatcactctagaatcttttcttgcctggaagaaaaggaaaagacaagaaaagattgataaacttgaacaagatatggaaagaaggaaagctgacttcaaagcagggaaagcactagtgatcagtggtcgtgaagtgtttgaatttcgtcctgaactggtcaatgatgatgatgaggaagcagatgatacccgctacacccagggaacaggtggtgatgaggttgatgattcagtgagtgtaaatgacatagatttaagcctgtacatcccaagagatgtagatgaaacaggtattactgtagccagtcttgaaagattcagcacatatacttcagataaagatgaaaacaaattaagtgaagcttctggaggtagggctgaaaatggtgaaagaagtgacttggaagaggacaacgagagggagggaacggaaaatggagccattgatgctgttcctgttgatgaaaatcttttcactggagaggatttggatgaactagaagaagaattaaatacacttgatttagaagaatgacaccaaacacatcgctgaaaaaattaagtcagctcagcacgagttgaaattgactacattaatttctttccacctagaatcaacaggatgtttatttcctatgctgattctggaggagttaacctcctgcaaaaaaggcatcttgtccctacatcttctcttctgactttggctacatctcatagtaagttcagagtagttcatgataaattgaaaatataatggtcattgcagaaaatgattgatgttgtaactgtccacccaagtaagaagtgtatctgcctttccatcttttggttttcatttgggcatgtgctattaccagaaacaacaaacttatatttaaaatacccttcatttgacacagtttttaatgagtgatttaatttcctctgtatttgtatgtttagaagactgcctaaaacatgagcactgtacttcataaaggaaactgcgtatgcagattcagtattgtgtatctttggacaattagatggacatttaaaatggaacttcttttatctgacaggatcagctacaatgccctgtgttaaattgtttaaaagtttcccttttcttttttgccaataaagttgtaaataaagaccatcatacattaaaatccaaaaaaaa

SEQ ID NO: 146 - DNA, 1550 bp, Homo sapiens
  misc_feature: Incyte ID No: 1702962CB1
gctcggcctctccccggcacgttctcagctgctcctggttcagacccagcgagggagccgcgagcgaggctcaccgtccccggcgtgcaggatccggggctgctgagcgctcgctcccgcgtgtccggcgcttggagtccccgcggcaggagaggagtcgggacactagagctccaggggcgcctgtgggctccagggcctccggcttccccagtccccttcagctaaagccccagagacgtgctcagccccaggacctctgcggaacaagatccggattgagaagccactgcaactaccgaaatgggcagcaaaaccttgccggcgccggtgcctatccacccttccctgcagctcaccaactactccttccttcaggcagtgaacggcctgcccacagtgccttcggaccatctgcccaacctgtatggtttcagcgcgttgcacgctgtgcacctgcatcagtggacgctgggctacccggccatgcacttgccgcgctcttctttctccaaagtgccgggcacggtgtccagcttggtggatgcgcgcttccagctgcccgcctttccctggttccctcatgtcattcaacccaagcccgagatcaccgctggaggcagcgttccagcgctcaagaccaagccgcgctttgattttgccaacctggccttggcagcaacgcaagaagatccggccaagctcggtcgcagggagggcccaggctcccctgcaggtgggctgggtgccctcctcgacgtgaccaagctgtctccagaaaagaagcccacaaggggacgtctgccttccaagaccaagaaggaattcgtctgcaagttctgtggccgccagttcaccaagtcctacaacctacttatccatgagcggacgcacaccgacgagcggccctacacctgtgacatctgccacaaagccttccggaggcaagaccacctgcgagaccacagatatattcactccaaagagaagcccttcaagtgtcaagagtgtgggaaaggattctgccagtccaggactctcgctgtccacaagacgctacactcacaggtgaaggagctcaaaacctccaagatcaaatgctaaatagaacctgtgggtcacaaggaccctaggcccagcggccctctcctccatagggaccagaagcctgactctggcgggcagcgggagaggcgctcgctcgggaccttccacctctccaacattgtcccctgggtccctggcgcacgcggcacttcagagccccgcccggggccgcgaccccgaccgtccctgctgctcccctaggacgcggctaaactcttggccaaaaggcggtactcacgtggcggaagggaaactgcattagagaaagaacgaaagctccgcggagccgcagcggcggctctcccagaagtattagtgctgctattgtagtttatacgggttctttgttatttttgcgttggacatataagcttgtaagtctgactggggagagtgagtggacagaggagaggcaacaagtcgttagcactggaggttccacg

SEQ ID NO: 147 - DNA, 1114 bp, Homo sapiens
  misc_feature: Incyte ID No: 1712916CB1
gcggccgcgccgcgcgtccctaccaaccgacaccatgaacaccatcgtcttcaacaagctcagcggtgcggtgctgtttgaggacggaggcgcctcggagcgggagcggggtggccggccctacagcggtgtcctggacagtcctcacgcccgccccgaggtgggcattcccgacggcccgcccctcaaggacaacctcggcctgagacaccggaggaccggcgcccggcagaatggcgggaaggtgaggcacaagcggcaggccctgcaagacatggcgcgacccctcaagcagtggctttacaagcaccgtgacaacccgtaccccaccaagaccgagaagatactcttggccctcggctcgcagatgacgctagtgcaggtgtcaaattggtttgctaatgcaagacgtcggcttaagaataccgttcgacagccagatttaagctgggctttgagaataaagttatacaacaagtatgttcaaggcaatgctgaacggcttagcgtaagcagtgatgactcatgttctgaagatggagaaaatcctccaagaacccacatgaacgaagggggctataataccccagttcaccatcctgtgattaaaagtgagaattcggtcatcaaagcgggagtgaggccagagtcacgggccagtgaggactacgtggcaccccccaaatacaagagcagcttgttgaaccgttaccttaatgactctttgagacatgtcatggccacgaacactaccatgatgggaaaaacaaggcaaagaaaccactcgggatcttttagctccaatgaatttgaggaagaattagtgtctccatcgtcatcagaaactgaaggcaactttgtctatcgcacagacactctggaaaacggatccaataagggtgaaagcgcacgtaacagaaaaggaccaagcaaggatgacacgtattggaaggagatcaacgcagctatggccttaacaaatcttgcacagggaaaggacaaactgcaaggaactaccagctgcatcatccagaagtcgtcccatatagcaggagtaagactgtcaagtgccgtggtgcacagtttaagagcttgtgctttcagtcagtgatgt

SEQ ID NO: 148 - DNA, 2380 bp, Homo sapiens
  misc_feature: Incyte ID No: 1748313CB1
agcgcggggactggctgggaagcggtcggtcgagtgtggcctgtgtggactcgcatcttgcccgaagctgggcggaggagagctcaagctaagggtgatcagcccatgacctaaacctccagacaaaataaaacagggaaaatttgctagaatcaagaatgatggatccatgttcagttggagtccagcttcgtactacaaatgagtgccataaaacctactatactcgtcacacaggttttaagactttgcaagaattgtcatcaaatgatatgcttttacttcaacttagaactggaatgacactttctgggaacaatacaatttgctttcatcatgtaaaaatttacattgacagatttgaggatttacagaagtcatgttgtgacccatttaacatacacaagaaattagccaaaaaaaatttgcatgtaattgacttagatgatgccacttttctgagtgctaaatttggaagacagcttgtacctggttggaagctttgtccaaaatgcacacagataatcaatggaagtgtggatgttgatactgaagaccgccagaaaaggaaacctgagtcagatggaagaactgctaaagctttgaggtcattacaatttacgaatccaggaaggcaaactgaatttgctccagaaactggtaaaagagaaaaaagaaggcttacaaaaaatgcaaccgctggttcagacagacaagtgataccagcaaagagtaaggtctatgatagccagggtctcctgatttttagtgggatggacctctgtgactgcctggatgaagactgcttaggatgtttctatgcttgtcctgcctgtggttctaccaagtgtggagctgaatgccgctgtgaccgcaagtggctgtatgagcaaattgaaattgaaggaggagaaataattcataataaacatgctggataatctgcggtaccaaactatggagcctttaaaggtctttatttctaaaaatctgttactctaagatacattttaagcttgattatcatatgacaaagattttaaaaccatctcagtgtgccctaatttttcatcttgggtgctttaagattcactatttgatataaattcagataggctatttttcagtagtcagcgttaagcctgtctggatcaatataaacaagtagggtgtaggcagtcctctatttgcatgtttcccatgggcacaaatttcagtgacctagatttagtttaaataccagtttccttaccaggaaggaaagaaaactggtaaggaaactgttgttgttaaaatctaggttaaaattttagttagcacattgtaactgagtaattacatgaagtacaaacctctctgctagctcttcagtctacaaatcgctatgtaaataacagatatgcttcatgattgtgaccagtcatgttatttctttcaaattcttccagtggtttgtccctgtgcatctgttaattcagttcacgtacagcagagcatgtagttatgctgtctctctgtcatctacttgacattctatagaagtgaacactcgaaagaactggtcaacaaagatgaaagtgcagcaaagcaatgaaaaatgataacactggaagtgaaattttaatcaaacataaatgaatttgtagaagaagtcactgaccatgggaatgttgttcttgctgctgtgtattcataggagcttagtgaaggcaaacttaccaacacaaataagcaaagtggttgcaataaagacagatacgtcccagaggaagtgatggttaaaaaaaaaaaactttacattaaaagatatttaatgtgaatatagaaatatttcacaacattgaaagcacaagcaataaaagggtggaagctgacccaaacttagaaggagtatggcagtttgccgtgaacataaaagatgcttactcagtatggtaagttacttgccagaaaaaaaggcaagccctattcaaactactttgtttttacaatgaaataaaacactttaattctatttctaatgttttaaattacagtgtactaaatatttttaaacatttttgcatttttttctacatttataactggtcttaagagtttttaatatttgagcagaaccttaaaggtcatggaacaatcatcattttccctattgattattaagattgcaggaccatttttatggtcccacagtaccatgtgaaatgaggatcgcttgtagctgggaacagtgcttacttcagggaaaactgattttgatagaaccgactagttgagtattaaactgttttggaaataatttatatatctaagtgctgaaatatatttctcttctccccacttattcaaataaaaaagttttaatactaaaaaaaaaaaa

SEQ ID NO: 149 - DNA, 1628 bp, Homo sapiens
  misc_feature: Incyte ID No: 1754833CB1
aggccggcgagggagcagcaaacggccggcggcgggtgccgcgctgtgggcgggcggcgcggagtaggtggcggcggccatggccgaggcgtcgccgcatcccggacggtacttctgccactgctgctccgtggagatcgtcccgcgcctgccggattatatctgtccaagatgcgagtctggttttatcgaggagcttccggaagagaccaggagcacagaaaatggttctgccccctccacagctcccacagaccagagccggccaccgttggagcacgtggaccagcacctgttcacgctgccgcagggctacggacagtttgctttcggcatcttcgatgacagcttcgagatccccacgttccctcctggggcgcaggctgacgacggcagggaccctgagagccggcgggagagagaccatccgtcccggcaccggtacggcgcccgacagccccgcgcccgcctcaccacgcggcgggccaccggccggcacgaaggcgtccccacgctggaagggatcatccagcagctcgtcaacggcatcatcacgcccgccaccatccccagcctgggccccctggggagtcctgcactcaaaccctatggactacgcctggggggccaacggcctggatgccatcatcacacagctcctcaatcagtttgaaaacacaggccccccaccggcagataaagagaaaatccaggccctccccaccgtccccgtcactgaggagcacgtaggctccgggctcgagtgccctgtgtgcaaggacgactacgcgctgggtgagcgtgtgcggcagctgccctgcaaccacctgttccacgacggctgcatcgtgccctggctggagcagcacgacagctgccccgtctgccgaaaaagcctcacgggacagaacacggccacaaacccccctggcctcactggggtgagcttctcctcctcgtcgtcatcgtcctcctccagctcgcccagcaacgagaacgccacaagcaactcgtgagcccacgtcggccgtcgggaaagcacggggcctttcccacccaccctcagccagcgccacacggcacccacagactgggtgccccggcggcgccacgcttggctggtcagcgctgcaggtcccgcctgttccagggcaggacccgggcccggcccaccggccccctggcttgggaaggcgtgggccacatggtcccctctggggcgtccccagcctccccgtcctctgtctaacctcaccctctaaacgttcagcggtggaaagatttttataattttaaattattactgctttgaaataaacggacgtttgagctcacgtggcggccatgcatggtttgtggcggaagacggggcccagcggctcccccagcgctgaagcacggggttcagcggctcccccagtgctgcaggtgccgccaggacgggccacgtgggcccccagcctccccctcggccgcctccacgacccggagtaggggggctcgggaccatgaggatgaccagcaaaattcaagaacaaaactgctccaacagacttttttaaaggaaaaaatatgtgtatcttgaaagctatttaaaatacactacttacaaagagaaaaaaaaaaaa

SEQ ID NO: 150 - DNA, 2210 bp, Homo sapiens
  misc_feature: Incyte ID No: 1798701CB1
gtgccgggcgccatcatggacgaggactactacgggagcgcggccgagtggggcgacgaggctgacggcggccagcaggaggatgattctggagaaggagaggatgatgcggaggttcagcaagaatgcctgcataaattttccacccgggattatatcatggaaccctccatcttcaacactctgaagaggtattttcaggcaggagggtctccagagaatgttatccagctcttatctgaaaactacaccgctgtggcccagactgtgaacctgctggccgagtggctcattcagacaggtgttgagccagtgcaggttcaggaaactgtggaaaattacttgaagagtttgctgatcaaacattttgacccccgcaaagcagattctatttttactgaagaaggagagaccccagcgtggctggaacagatgattgcacataccacgtggcgggaccttttttataaactggctgaagcccatccagactgtttgatgctgaacttcactgttaagcttatttctgacgcagggtaccagggggagatcaccagtgtgtccacagcatgccagcagctagaagtgttctcgagagtgctccggacctctctagctacaattttagatggaggagaagaaaaccttgaaaaaaatctccctgagtttgccaagatggtgtgccacggggagcacacgtacctgtttgcccaggccatgatgtccgtgctggcccaggaggagcaggggggctccgctgtgcgcaggatcgcccaggaagtgcagcgctttgcccaggagaaaggtcatgacgccagtcagatcacactagccttgggcacagctgcctcctaccccagggcctgccaggctctcggggccatgctgtccaaaggagccctgaaccctgctgacatcaccgtcctgttcaagatgttcacaagcatggaccctcctccggttgaacttatccgcgttccagccttcctggacctgttcatgcagtcactctttaaaccaggggctcggatcaaccaggaccacaagcacaaatacatccacatcttggcgtacgcagcaagcgtggttgagacctggaagaagaacaagcgagtgagcatcaataaagatgagctgaagtcaacgtcaaaagctgtcgaaaccgttcacaatttgtgttgcaacgagaacaaaggggcctctgaactagtggcagaattgagcacactttatcagtgtattaggtttccagtggtagcaatgggtgtgctgaagtgggtggattggactgtatcagaaccaaggtactttcagctgcagactgaccatacccctgtccacctggcgttgctggatgagatcagcacctgccaccagctcctgcacccccaggtcctgcagctgcttgttaagctttttgagactgagcactcccagctggacgtgatggagcagcttgagttgaagaagacactgctggacaggatggttcacctgctgagtcgaggttatgtacttcctgttgtcagttacatccgaaagtgtctggagaagctggacactgacatttcactcattcgctattttgtcactgaggtgctggacgtcattgctcctccttatacctctgacttcgtgcaacttttcctccccatcctggagaatgacagcatcgcaggtaccatcaaaacggaaggcgagcatgaccctgtgacggagtttatagctcactgcaaatctaacttcatcatggtgaactaatttagagcatcctccagagctgaagcagaacattccagaacccgttgtggaaaaaccctttcaagaagctgtttttaagaggctctggcagcgtcttgaaaatgggcaccgctgggaggaggtggatgacttctttacaaaggaaaatggtagcagcttcagtgagaaactgcccttacaaacagtcccttctctgctgtcaatccaatactgctcccaaatcctgttttcagtgttcatttccctcaaggcaggcgctgggctcccacgacccctcaggacagatctggccgtcagccgcgggccgctgggaactccactcggggaactcctttccaagctgacctcagttttctcacaagaacccagttagctgatgttttattgtaattgtcttaatttgctaagaacaagtaataagtaaatttttaaaaagccaaaaaaaaaaa

SEQ ID NO: 151 - DNA, 1220 bp, Homo sapiens
  misc_feature: Incyte ID No: 1842496CB1
ctctcacgtgaccaggagtcgacgtgtgcagaagtccttatagtccagggcctgtttccctgtagcagctccttattgctggagaaggagaaaagtgcccaagatcctttcaggatatttggttttttgggcgcgacacaaatcgaggtgagggaagagagaggaaaatcccctgaatccctgcaggattaatttattcaaaaaggaaataaaaaatactcaatatgcaaaagtcttgtgaagaaaatgagggaaaaccacagaacatgccaaaggccgaggaagatcgccctttggaggatgtaccacaggaggcagaaggaaatcctcaaccttccgaagaaggcgtaagccaggaagcagaaggaaaccccagaggagggccgaatcagcctggccagggatttaaagaggacacacccgttaggcatttggaccctgaagaaatgataagaggagtagatgagcttgaaaggcttagggaagagataagaagagtaagaaacaagtttgtgatgatgcattggaagcaaagacattcacgcagccgtccttatcctgtgtgctttaggccttgaattcatttttgcctaatattaaaatctggccccagctttctttctgttagcattttctgatgtatctttgacctccattttacttttaatcatctgatgaaattttgttttaggtaatttccttggtaccagcatctcattggattttggattttgacccattttccaggtctatttttcaattggaaactttcacacatttgcatgggaatatgttcattccatgttgtaaagtaaaacataacaggttatggcaaagcagcatatttaatatcagctcacatatgtaggataaaattccaaactttgtgtgtgtgcgtgtgtgtatacatacatccatataacatatatcacaaacttaaccaagcttatttctgtgtggtgtgaaattttatttgttttcttctttttgttctttttgcttatatgtactttttaatgaacacgtgtctcacacacaaaaagaattaaggattttttttacaagtaagagtcaaataatttgcaaccagcttatgagggcaatgggggcacctaaactcttgatgaaagaactttaaaaagaaatgtaaacctcaaattacctctggatctcttagccagaggaataaactggcaattattacagataaaaaaaaaaaa

SEQ ID NO: 152 - DNA, 1687 bp, Homo sapiens
  misc_feature: Incyte ID No: 1868613CB1
aggagagaagaggcgggagtggacctggtcagccctaccccactgacccccaccggacccaggcgcggcctccgccacagccacagcccctgcccctgctgcggcgcggcgaggcgaggcgatggccaaggtgtcggtgctgaacgtggcggtcctggagaacccgagccctttccacagccccttccggttcgagatcagcttcgagtgcagtgaagccctggcggacgacctggagtggaagatcatttatgttggctcggctgagagtgaggaatttgatcagatcctagactcggtgctggtgggccctgtgccagcagggagacacatgtttgtctttcaggccgacgcccccaacccatccctcatcccagagactgatgccgtgggtgtgactgtggtcctcatcacctgcacctaccatggacaggagttcatccgagtgggctactacgtcaacaacgagtacctcaaccctgagctgcgtgagaacccgcccatgaagccagatttctcccagctccagcggaacatcttggcctcgaacccccgggtgacccgcttccatatcaactgggacaacaacatggacaggctggaggccatagagacccaggacccctccctgggctgcggcctcccactcaactgcactcctatcaagggcttggggctccctggctgcatccctggcctcctccctgagaactccatggactgcatctaactgcaggaacccagagtgtcccagcacgccgggaggggcaaccaggcctcccagcgagtcctgcagggcccatctagaggactttgggggccatcagctgcaatccaggtctgtcaaactcagcccctaggaaagaacaggccttgggtctcccctagtcctggccagaaggatgatctcgcttttcctctacaggcctataagaagcaggtacttcagttctaaattctgacttgtgttcttttcgtcttcataaattctaactaaggccactgtgccactgtgcacccttgagtaccattgatccaaagctttcccacagacctccctggcccacctagaggctttcttggtcagtgcctgtcaaggctccagtcctgctgagccaaaggctttgtcattcctttctcttcctgtacatctgagcagacccactccagctttctggtgtcacaggcgggaatgttagttagtaggtagacttagatcccatttctgtcctgctcccaggaagattcttaggtcctcttcaatccagcagcccctcccagaggtgtgatcagcaggatgctgaggaaccatgttgcctttcctgtcaatcacagccaccttcctgttatctcctaaatggatctggcttttcctggaggctgccatggttggaagatggtatcagagggcctgcctgggcagtctgtctccgggccagggtcagggaccctctgcctctggcagccttaacctgtcctctgctaggaccagggtgatttcaagccagggaagcaactgggaccctgaaaactgtccctccccagcccgctccccctctctgtgccctggtccccttgctgccatgtggatgctgttgtgattgctgtttgtatattatcaaaatgtttttatattaaaaatgtttggtctgaaaattaaaagcacttcatttagaaaaaaaaaaaa

SEQ ID NO: 153 - DNA, 2797 bp, Homo sapiens
  misc_feature: Incyte ID No: 1870609CB1
gtgttttgatgttggtggctaagctcatccagtgtattgtgtttggccctcttcgagtgagtgagagacagtctcttcttgtgacagtgaggactgctcatgtgattttacgatacgtaattcacctctgggacctcaaccacgaagggacgtgggaaggaaaggggacgtatgtctattacacagactttgtcatggagctcactctcctgtccctggacctcatgcaccatattcacatgttgttatttggcaacatctggttatccatggccagcctggtcatctttatgcagctgcgttacctgtttcatgaggtgcaacgtcgaattcgtcggcacaagaactatctacgtgtggttggaaacatggaggccaggtttgcagttgcaactccagaggagctggctgtcaacaatgacgactgtgccatctgttgggactccatgcaggctgcgcggaaactgccctgtggacatcttttccacaactcctgtcttcgttcctggctagaacaagacacctcctgtccaacatgcagaatgtctcttaatattgccgacaataatcgtgtcagggaagaacatcaaggagagaacttggatgagaatttggttcctgtagcagcagccgaagggagacctcgcttaaaccaacacaatcacttcttccatttcgatgggtctcggattgcgagctggctgccgagtttttcggttgaagtgatgcacaccaccaacattcttggcattacgcaggccagcaactcccagctcaatgcaatggctcatcagattcaagagatgtttccccaggttccataccatctggtactgcaggacctccagctgacacgctcagttgaaataacaacagacaatattttagaaggacggattcaagtaccttttcctacacagcggtcagatagcatcagacctgcattgaacagtcctgtggaaaggccaagcagtgaccaggaagagggagaaacttctgctcagaccgagcgtgtgccactggacctcagtcctcgcctggaggagacgctggacttcggcgaggtggaagtggagcccagtgaggtggaagacttcgaggctcgtgggagccgcttctccaagtctgctgatgagagacagcgcatgctggtgcagcgtaaggacgaactcctccagcaagctcgcaaacgtttcttgaacaaaagttctgaagatgatgcggcctcagagagcttcctcccctcggaaggtgcgtcctctgaccccgtgaccctgcgtcgaaggatgctggctgccgccgcggaacggaggcttcagaagcagcagacctcctagcgctcccttgccttcctcagctgcctcctgcgccctgtgcccgactgactggaggaggcctgtcccaattctgcccgctccatggaaaagcgggcttgactgcattgccgctgtataaagcatgtggtcttatagtgtttggacagctgataaatttaatccttctttgtaatactttctatgtgacatttctcttccccttagaaacactgcaaattttaactgtaggtatgatctcttctggtgttgactggactgcttggggtgggggacgatcaggaggaagtgagcagtcgcctgcctgcagcaggcagcttctactcctgcctcatgcgtacgtcccacaaatgcaggtgtcctgagcaccacacccagtgggaagagtgtgggggaggcgcacagtgtgagcccgcccccacgtcgtggggtaacatctgttatcaaactgctgtcgttgttgtggaagcatgtagactgtgccagaggccagacccacgggctcatgcacccctgagccagcagggcatcttggaaaaggaactcttggttcgatacctggagcagaggaggggaaagtccagggctatagggtgtgatgaagtcacccctttctgtcccactacatctgggactgactttccgagcctccagtccaaagccggcttgatttccgtgaactctggtgctcctgcatctcatgagtgtgccccatgggtcccctcccctctcagcatttccttgtcccgtctggacctggggagtggttaggcagcaagctttggtttatggttttcattcattggtgaagtaaattaggcagtgctaaagcctgtgggtttggtccttgaacaagatgtgggccttgcaagatgggagagtaaaccttgaagggctttattaaagaaataaaaaagaacttttgtatcttttatcctgggagcactgcgttttcctagctgtgttattcctggtttaattcagcagagaaggtaaggtgtgaacctacctgccttggagagggcccaggtcccaaatctcttcaaattcttcacatgtttaactttaaggatttgaaccatgaagtcataggttacagacctcagttttatgccccattggattacttttttttttttttttttttttactctttgaaagctttgttttgtggtagtccttttgggaagaatccagtattatctacaattattggcaaagtttaaatgtattttacataacggaaagtttttagaatgttgaaaagtaattgaaaaaggtgataggtaaatttttaggcaaagataatttatttcaataaatctttcaaaagccttaccttgaaatgctgttagtaaatttctgtgattttttttttttaatttgttttgctgagagcatagctatttgtttttattgtaaaacaataataataataaaaagcaaactctaaaaaaaaaaaa

SEQ ID NO: 154 - DNA, 2685 bp, Homo sapiens
  misc_feature: Incyte ID No: 1871961CB1
ccgcgggccggagccgcccggccgaggcgtgggggctgcggggccggcccatccgtgggggcgacttgagcgttgagggcgcgcggggaggcgagccaccatgttcagccagcagcagcagcagcagctccagcaacagcagcagcagctccagcagttacagcagcagcagctccagcagcagcaattgcagcagcagcagttactgcagctccagcagctgctccagcagtccccaccacaggccccgttgcccatggctgtcagccgggggctccccccgcagcagccacagcagccgcttctgaatctccagggcaccaactcagcctccctcctcaacggctccatgctgcagagagctttgcttttacagcagttgcaaggactggaccagtttgcaatgccaccagccacgtatgacactgccggtctcaccatgcccacagcaacactgggtaacctccgaggctatggcatggcatccccaggcctcgcagcccccagcctcacacccccacaactggccactccaaatttgcaacagttctttccccaggccactcgccagtccttgctgggacctcctcctgttggggtccccatgaacccttcccagttcaacctttcaggacggaacccccagaaacaggcccggacctcctcctctaccacccccaatcgaaaggattcttcttctcagacaatgcctgtggaagacaagtcagaccccccagaggggtctgaggaagccgcagagccccggatggacacaccagaagaccaagatttaccgccctgcccagaggacatcgccaaggaaaaacgcactccagcacctgagcctgagccttgtgaggcgtccgagctgccagcaaagagattgaggagctcagaagagcccacagagaaggaacctccagggcagttacaggtgaaggcccagccgcaggcccggatgacagtaccgaaacagacacagacaccagacctgctgcctgaggccctggaagcccaagtgctgccacgattccagccacgggtcctgcaggtccaggcccaggtgcagtcacagactcagccgcggataccatccacagacacccaggtgcagccaaagctgcagaagcaggcgcaaacacagacctctccagagcacttagtgctgcaacagaagcaggtgcagccacagctgcagcaggaggcagagccacagaagcaggtgcagccacaggtacagccacaggcacattcacagggcccaaggcaggtgcagctgcagcaggaggcagagccgctgaagcaggtgcagccacaggtgcagccccaggcacattcacagcccccaaggcaggtgcagctgcagctgcagaagcaggtccagacacagacatatccacaggtccacacacaggcacagccaagcgtccagccacaggagcatcctccagcgcaggtgtcagtacagccaccagagcagacccatgagcagcctcacacccagccgcaggtgtcgttgctggctccagagcaaacaccagttgtggttcatgtctgcgggctggagatgccacctgatgcagtagaagctggtggaggcatggaaaagaccttgccagagcctgtgggcacccaagtcagcatggaagagattcagaatgagtcggcctgtggcctagatgtgggagaatgtgaaaacagagcgagagagatgccaggggtatggggcgccgggggctccctgaaggtcaccattctgcagagcagtgacagccgggcctttagcactgtacccctgacacctgtcccccgccccagtgactccgtctcctccacccctgcggctaccagcactccctctaagcaggccctccagttcttctgctacatctgcaaggccagctgctccagccagcaggagttccaggaccacatgtcggagcctcagcaccagcagcggctaggggagatccagcacatgagccaagcctgcctcctgtccctgctgcccgtgccccgggacgtcctggagacagaggatgaggagcctccaccaaggcgctggtgcaacacctgccagctctactacatgggggacctgatccaacaccgcaggacacaggaccacaagattgccaaacaatccttgcgacccttctgcaccgtttgcaaccgctacttcaaaacccctcgcaagtttgtggagcacgtgaagtcccaggggcataaggacaaagccaaggagctgaagtcgcttgagaaagaaattgctggccaagatgaggaccacttcattacagtggacgctgtgggttgcttcgagggtgatgaagaagaggaagaggatgatgaggatgaagaagagatcgaggttgaggaggaactctgcagcaggtgaggtccagagatatatccagagaggagtggaagggctcggagacctacagccccaatactgcatatggtgtggacttcctggtgcccgtgatgggctatatctgccgcatctgccacaagttctatcacagcaactcaggggcacagctctcccactgcaagtccctgggccactttgagaacctgcagaaatacaaggcggccaagaaccccagccccaccacccgacctgtgagccgccggtgcgcaatcaacgcccggaacgctttgacagccctgttcacctcc

SEQ ID NO: 155 - DNA, 1879 bp, Homo sapiens
  misc_feature: Incyte ID No: 1876258CB1
aaaaacacacagagagacagagcaaaaaggagaagtatctatttgtgcaaagagtcacacagttgacagagtggaggccagtcccgagagaggctttgcagttcccacctcgggaagctccggcagaacccaggcgagggacagctccggacaggtgtggggtgcacactgaaaatgccacgctccttcctggtgaagagcaggaaggctcacacctaccaccagccccgtgtgcaggaagatgaaccgctctggcctcctgcccttaccccggtgcccagagaccaggctccaagcaacagccctgtccttagcactctattcccaaaccagtgcctggactggaccaacctcaaacgagagccggagctggagcaggaccagaacttggccaggatggccccggcaccagagggccccattgtgctgtcccgaccccaggatggggactctccactgtccgactcacccccattctacaagcctagcttctcctgggacaccttggccacaacctatggccacagctaccggcaggccccctccaccatgcagtcagccttcctggagcactccgtcagcctgtacggcagtcctcttgtgcccagcactgagcccgccttggacttcagcctccgctactccccaggcatggatgcgtaccactgtgtgaagtgcaacaaggtcttctccacccctcacgggctcgaagtgcatgtgcgacgctcccatagtgggacccggcccttcgcctgtgacatctgcggcaaaaccttcggccacgctgtgagcctggagcagcacacgcacgtccactcccaggggatcccggccgggtccagtcctgagcctgcacctgaccccccggggcctcatttcctccggcaggagcgcagcttcgagtgccgcatgtgcggcaagaccttcaagcgctcgtccacgctgtccacccacctgctcatccactcagacacgcggccctacccctgccagttctgcggcaagcgtttccaccagaagtccgacatgaagaagcacacctacatccacacaggtgagaagccgcacaagtgccaggtgtgcggaaaggccttcagccagagctccaacctcatcacccacagccgcaagcacacaggcttcaagcccttcagctgtgagctgtgcaccaaaggcttccagcgcaaggtggacctgcggcggcaccgcgagagccagcacaatctcaagtgaggctgcgccggctcccagctcctggccagcctgccctgcggtcctgtcacctggaggccagcctcacatgcccaaatctccagtctcctggaggtgggactggacaggagtctaccagcttgttttgagactcatgaaattgctgtgtgaccttgggcaagtcacttaccctgtctggatcaacatttctcctgctgccaagtgtgggagcctggctgggtctttctcagcagaagttgtttccaggtgtgctcaagtgccttcctctagcagagcacagaaagctagaatacccccagggagacagggatgccaagagtagaccagagctgggacccacagacagaacctccacctgcctgctgcccactgagctgggacctggtcaccttggattttagccggcctctttctggctataacaggcagagtcggagctgcctcccaccccagtcagaagcctggcaccccctctgcttcggccagatgtgctggctgactccgacttccgaccagcactcagctggcctctggggattctagctccacaaccaggccgtgaggctggagaaactggcagttattgctgtcaaaagcctgttctctcaactgctgtcaataaaattaaagatacagaaaaaaaaaa

SEQ ID NO: 156 - DNA, 4462 bp, Homo sapiens
  misc_feature: Incyte ID No: 1929822CB1
atccgcccgccgccgccgccgctgtccggcccccgagcacgccggccccgcgcgcgcctcgaggccgagtcaagaaactatgttccaacttcctgtcaacaatcttggcagtttaagaaaagcccggaaaactgtgaaaaaaatacttagtgacattgggttggaatactgtaaagaacatatagaagattttaaacaatttgaacctaatgacttttatttgaaaaacactacatgggaggatgtaggactgtgggacccatcacttacgaaaaaccaggactatcggacaaaacctttctgctgcagcgcttgtccattttcctcaaaattcttctctgcctacaaaagtcatttccgcaatgtccatagtgaagactttgaaaataggattctccttaattgcccctactgtaccttcaatgcagacaaaaagactttggaaacacacattaaaatatttcatgctccgaacgccagcgcaccaagtagcagcctcagcactttcaaagataaaaacaaaaatgatggccttaaacctaagcaggctgacagtgtagagcaagctgtttattactgtaagaagtgcacttaccgagatcctctttatgaaatagttaggaagcacatttacagggaacattttcagcatgtggcagcaccttacatagcaaaggcaggagaaaaatcactcaatggggcagtccccttaggctcgaatgcccgagaagagagtagtattcactgcaagcgatgccttttcatgccaaagtcctatgaagctttggtacagcatgtcatcgaagaccatgaacgtataggctatcaggtcactgccatgattgggcacacaaatgtagtggttccccgatccaaacccttgatgctaattgctcccaaacctcaagacaagaagagcatgggactcccaccaaggatcggttcccttgcttctggaaatgtccggtctttaccatcacagcagatggtgaatcgactctcaataccaaagcctaacttaaattctacaggagtcaacatgatgtccagtgttcatctgcagcagaacaactatggagtcaaatctgtaggccagggttacagtgttggtcagtcaatgagactgggtctaggtggcaacgcaccagtttccattcctcaacaatctcagtctgtaaagcagttacttccaagtggaaacggaaggtcttatgggcttgggtcagagcagaggtcccaggcaccagcaagatactccctgcagtctgctaatgcctcttctctctcatcgggccagttaaagtctccttccctctctcagtcacaggcatccagagtgttaggtcagtccagttccaaacctgctgcagctgccacaggccctcccccaggtaacacttcctcaactcaaaagtggaaaatatgtacaatctgtaatgagctttttcctgaaaatgtctatagtgtgcacttcgaaaaagaacataaagctgagaaagtcccagcagtagccaactacattatgaaaatacacaattttactagcaaatgcctctactgtaatcgctatttacccacagatactctgctcaaccatatgttaattcatggtctgtcttgtccatattgccgttcaactttcaatgatgtggaaaagatggccgcacacatgcggatggttcacattgatgaagagatgggacctaaaacagattctactttgagttttgatttgacattgcagcagggtagtcacactaacatccatctcctggtaactacatacaatctgagggatgccccagctgaatctgttgcttaccatgcccaaaataatcctccagttcctccaaagccacagccaaaggttcaggaaaaggcagatatccctgtaaaaagttcacctcaagctgcagtgccctataaaaaagatgttgggaaaaccctttgtcctctttgcttttcaatcctaaaaggacccatatctgatgcacttgcacatcacttacgagagaggcaccaagttattcagacggttcatccagttgagaaaaagctcacctacaaatgtatccattgccttggtgtgtataccagcaacatgaccgcctcaactatcactctgcatctagttcactgcaggggcgttggaaagacccaaaatggccaggataagacaaatgcaccctctcggcttaatcagtctccaagtctggcacctgtgaagcgcacttacgagcaaatggaatttcccttactgaaaaaacgaaagttagatgatgatagtgattcacccagcttctttgaagagaagcctgaagagcctgttgttttagctttagaccccaagggtcatgaagatgattcctatgaagccaggaaaagctttctaacaaagtatttcaacaaacagccctatcccaccaggagagaaattgagaagctagcagccagtttatggttatggaagagtgacatcgcttcccattttagtaacaaaaggaagaagtgtgtccgtgattgtgaaaagtacaagcctggcgtgttgctggggtttaacatgaaagaattaaataaagtcaagcatgagatggattttgatgctgagtggctatttgaaaatcatgatgagaaggattccagagtcaatgctagtaagactgctgacaaaaagctcaaccttgggaaggaagatgacagttcctcagacagttttgaaaatttggaagaagaatccaatgaaagtggtagcccttttgaccctgtttttgaagttgaacctaaaatctctaacgataacccagaggaacatgtactgaaggtaattcctgaggatgcttcagaatctgaggagaagctagaccaaaaagaggatggttcaaaatacgaaactattcatttgactgaggaaccaaccaaactaatgcacaatgcatctgatagtgaggttgaccaagacgatgttgttgagtggaaagacggtgcttctccatctgagagtgggcctggatcccaacaagtgtcagactttgaggacaatacctgcgaaatgaaaccaggaacctggtctgacgagtcttcccaaagcgaagatgcaaggagcagtaagccagctgccaaaaaaaaggctaccatgcaaggtgacagagagcagttgaaatggaagaatagttcctatggaaaagttgaagggttttggtctaaggaccagtcacagtggaagaatgcatctgagaatgatgagcgcttatctaacccccagattgagtggcagaatagcacaattgacagtgaggatggggaacagtttgacaacatgactgatggagtagctgagcccatgcatggcagcttagccggagttaaactgagcagccaacaggcctaagtgccaggttccctggcgttggtgacatgctgcagcctggaactctgatctccagtgtgactgcaaagctgtcttctcactggtactgccttgtgagtactggttggactgtggggcatgtggccgctgcagttccagtggttatttctaagtctatgacaggacaggctgttcttgcttcagaaccttctctgacagacacggtaactaaatgtgaaaaaccaataagctggtgactcatgaatacacacgaggaaaagcagaggtttattttatctgccttttcaacatttctttccctctgtgaaatgattggtcagatgtctttgagaagtgttaaactaattcacatggtagtgtagggccaacatacaagctaccagtctaatgtgtatagtagactttgggaaaagcgattttttttcatgtattcattctgaatagttgaaatgtatatttgtacagtcttttagacctattcaagtgatgctcatgatcctgttactgtgtgcccatcatagatttctttttttagtgttgcccttgctgtgtaataaacgctctatctagtttacctagcaaaagctcaaaactgcgctagtatggactttttggacagacttagtttttgcacataaccttgtacaatcttgcaacagaggccagccacgtaagatatatatctggactctcttgtattataggatttttcttgttctgaatatccttgacattacagctgtcaaaaacaaaaactggtatttcagatctgttttctgaaatcttttaagctaaaatcacatgcaagaattgactttgcagctactaattttgacaccttttagatctgtataaaagtgtgttgtgttgaagcagcaaaccaatgagtgctgcattttggatatttagttttatctttagttcaacaccatcatggtggattcatttataccatctaatatatgacacactgttgtagtatgtataattttgtgatctttattttccctttgtattcattttaagcatctaaataaattgctgtattgtgcttaatgtaaaaaaaaaaaaaaa

SEQ ID NO: 157 - DNA, 2203 bp, Homo sapiens
  misc_feature: Incyte ID No: 1970095CB1
ggccaaggccagggcctgactaaacctggagactcgggtggccgaggggcttcataccagctgaagagcgacaagccgctggcagccgcggatctcaccgccgctcagggtttttagaacttcagccataaaaatgggcagaattttccttgatcatatcggtggtacccgtctgttttcttgtgcaaactgtgatacgatcctgaccaaccgctcagaactcatctccactcgtttcacaggcgccactggcagagcatttctttttaacaaggtagttaacctgcagtacagtgaagttcaagatcgggtcatgctcactggccgccacatggttcgagatgtgagctgcaaaaactgcaatagcaaactgggatggatctatgagtttgccactgaagacagccagcgatataaggaaggccgcgtgatcctggaacgtgctctagttcgagagagtgagggctttgaggagcatgtaccatctgataactcttgaagatacagagagaaatccatcttttcccaggtctccttcactgaaaacaaaaatctacttacatacactgtcaccttagcatcagagtcggattaatgaactgcggaacaagaggttgtgagaatctaagatggaacctttctttctttctttctttttttttaaattttgtattttccatccaacagcagcgtgtagagagaatattatgcagatgccgttaattttttaccctatgtttacgtcttgaggcagcagagtctgtctgcagctatgtggtgagctatgtaaggaaaaaaatctgggctgttagagtgaaaaagtgtgttttatgtcaattgtgaaaggaaaatgttaggagtatggtttttaaacttgggcttcattttaaacttttttttttaaacccagttatttcacttgatttgctagcttcagagaagagatccgaatctgtgcccagcgctaaaggctcagtgttagcatggcttgtgctggccggtgtgccatattcttgttggagatgaaccgtagcaccagagcccattcttccttgtcagtcttggcccaaagatgtcaccattcctagttatttgtcaccacataattggtgttgattggaaactttttctgagatgggacagaactgctgggttgtctttttccatgtaacttaagcatagtaatataaataaagtaatagttggatgcttttggtcctgtgttgcttttaaaaacaccttataaaagaggagagtatttgataagcaattttcatagtagtaaagttttttttcatctcttaaactaaattgaccatgcatataatattctttgtttaaatgaaagcatactgttgaaacccgcagtgttgcatttagaaaacagttgaacagaatgtcaatgtgcattcatgcaaaaaaacatttaatctgcatctgttttagaaaagggggaaatgaagcaacttgtctaaaaatactgctttacaaagcatttcagcctttccccctcagttttgcattgattttttgacaagtctgtagagcctaatagtttccatcaaaggcctagatctcttatttagcatttttttcagctcttctctcagaagttcagctgttgaaacgaaaactgtactttgtaccctcacatacaaagggatcaaatttgacctggtgttattttagccccaaatttatgacattacacaatattaaaatgtaaatgtttctttacccaaactacttctagatattctagtatttgcttctggtggaattaaatgacggtaaaattggctaattatttgaatgaatgaatggatggatgttttgcatgctcaatttctaggtcctttgtctagaaaggaaatttgcctcagttgaattagtgaaatatttctgtcgttgatattaaaagtgacttctgagtacagttaagttcctcctatttgccactgggctgttggttagaagcataggtaactgattaagtaggtatgatactgcatttgaaataagtggacacaaactatcctttctccaccatggactcaatctgagaacaacagcattcatttccattcatttccatactggcttttgattatatgcagattcctagtagcatgccttacctacagcactatgtgcatttgctgtcacaataaagtatattttgtcttgcaaaaaaaaaaaaaaa

SEQ ID NO: 158 - DNA, 1393 bp, Homo sapiens
  misc_feature: Incyte ID No: 1975473CB1
cggctcgagccagcaccctcctccggtccccagggtccccgcaggagacagtccctgaattcccctgcacattccggcccccgaccccggcccctacaccgccccggccacctccaggcccggccacattggccccttccaggcccctgcttgtccccaaagcggacggctctcacccccagcgcccagcggtaaagagaggggttgcagggattgggggaatctaggggatgaggggaagaggaggaagaagaaggggactgggtctggggccagatgagaggaagggggcaatggggaccctttcccctgggtcggtctttctgtgggtctgtctgtccctaccacaggcagtgaacggcggctgtcaggggacctcagctccatgccaggccctgggactctgagcgtccgtgtctctcccccgcaacccatcctcagccggggccgtccagacagcaacaagaccgagaaccggcgtatcacacacatctccgcggagcagaagcggcgcttcaacatcaagctggggtttgacacccttcatgggctcgtgagcacactcagtgcccagcccagcctcaaggtgagcaaagctaccacgctgcagaagacagctgagtacatccttatgctacagcaggagcgtgcgggcttgcaggaggaggcccagcagctgcgggatgagattgaggagctcaatgccgccattaacctgtgccagcagcagctgcccgccacaggggtacccatcacacaccagcgttttgaccagatgcgagacatgtttgatgactacgtccgaacccgtacgctgcacaactggaagttctgggtgttcagcatcctcatccggcctctgtttgagtccttcaacgggatggtgtccacggcaagtgtgcacaccctccgccagacctcactggcctggctggaccagtactgctctctgcccgctctccggccaactgtcctgaactccctacgccagctgggcacatctaccagtatcctgaccgacccgggccgcatccctgagcaagccacacgggcagtcacagagggcacccttggcaaacctttatagtcctggccagaccctgctgctcactcagctgccctgggggctgctttccctgggcacgggctccagggatcatctctgggcactcccttcctgccccaggccctggctctgcccttccctggggggtggagcagggtccaggtttcacacttgccacctcctggaggtcaagaagagcagagtccccgtccctgctctgccactgtgctccagcaccgtgaccttgggtgactcgtccgctgtctttggaccgctgtgtttcaatctgcaaaatggggatggggaaggttcaatcagcagatgacc

SEQ ID NO: 159 - DNA, 2164 bp, Homo sapiens
  misc_feature: Incyte ID No: 1976527CB1
gagactgtgggacactgtaggccacgtggggcggaacggaaacctcgcagggtcagaccgtagcgacgcgggaagtccggacgcagtagctccctgaagcggaggcgaaggggagtttaagccccagcggcggcaatggcggagaggcccgaggacctaaacctgcccaatgccgtgatcaccaggatcatcaaggaggcgctcccggacggtgtcaacatctccaaggaggcccggagcgccatctcccgcgccgccagcgtcttcgtgctgtacgccacatcctgtgctaacaactttgcaatgaaaggaaagcggaagacgctgaatgccagtgatgtgctctcagccatggaagagatggagttccagcggttcgttaccccattgaaagaagctctggaagcatataggcgggagcagaaaggcaagaaggaggcctcagagcaaaagaagaaggacaaagacaaaaaaacagactcggaagagcaagacaagagcagggatgaggacaatgatgaagacgaagaaaggctggaagaagaagaacagaatgaagaggaagaagtagacaactgaaaagggcgggagactgtggcaccttggaaggtaccacttgaaatgagacgtgctacgtgtttctgtgaagcttttccatgctgggcagagtagtctcaggcaaaagtgcctgaaaagatcagaataaaaactgactagaaataccgtcaaaaccagcacttaccaaactcagagcatctgagtagcagaatcctgttttgcttcatcaatctgaaggttatggccttttgacaagagggattctgaacgactaaattagtcagtttgctcgcttttgtttacttaaatgtatggttagatggtttttgatctgcagtcttccctagtcccccaaataagtaataataacttccatgctgcctgctgtgttccagatcacagaggcagccaaggctcaggaaaaactggggctttgcttatggtcagcctatgtttgattgcacagtctttgacaatagtagcttactaagactgctcagaatgagtaagctttaggaaactactaaaatgctgtgggagaataacaaaatccgttctctctcttcacttgacagaagcattaactgaattttgtttttcatagacccacttggcccaaaacctttctatattgcctgtagatgatcggcctgctggtgtggtagtaatctgatcacagatattcttaaatcagcagtgtggaatggtattagtcaaacatggtgccagtgtcttttacaaaaacagatggcatagtgtcagatgtaccttactctctgctactgtacagctttaggatttgtcatcacctcccggaaggtgtaaaaccccaggcttcctcttcttgtagtccatctcccagacttgtgactatggcttttcattcttcaattcatgacgagtgccaaacttgattttctctaggcacagctttctccctctgtgcctcctgcttcctttctctctcctgcctctcctctgctccccatcccactttctcatctgcctccttttctcacttctgtcagtctgtaagctttgataacctgcttaatactccaaagtgtgagttcctctgatctcttgattccttagttctaatctcacgttttgtttttaagagatggagtctctcactctgtggcccaggctggagtgcagtggcatgatcatagctcattgcatccttgaaatcctgggctcaggtgatcctcccgcctgagcctcctgagtatctgggactacagatgcgtgccaccaagcctggctaattttgtctcatgtcttctaaaaattattttgtgaagccccttcacaaaaaaccttaagggaaatctgatggtgctcaggaatctaactctccctaaaccatcctctttaactgcttctaaaatatctctgttggcctttcttagcctttttctgtttccattcagtgctccaagcgctttttgtttctaagttgagtgcttggggtttgacaggtagtgacgtgtagtttgacactgttaacttgttaaatacagtgaaaagtttgtgagtgaagaatgctgagaagattgtaatgctttgtacaaataaaagtcttgttaaaaaaaaaaaaaaa

SEQ ID NO: 160 - DNA, 445 bp, Homo sapiens
  misc_feature: Incyte ID No: 2108023CB1
gggtagcgttgttgacatcccgggaggctgtgccgccggcctgagcccagagtttcgcggcctccgcgatggcagaggtggaggaaaccttaaagaggatccagagtcataaaggggttattggaactatggttgtaaatgcagaaggtattcccatccgaacaaccttggacaactcaacaactgttcaatatgcaggccttcttcatcacctgacaatgaaagccaaaagcacagttcgtgatattgatcctcagaacgacctgacttttcttaggatcagatcaaagaaacatgaaatcatggtagctccagataaggaatatcttctgatcgtcattcagaatccatgtgaatagacctgcgatggccaaggctgtttaagcgacactgggttggaaacacttggctctctcatgagtattaaaattctatttcaatctaa

SEQ ID NO: 161 - DNA, 2029 bp, Homo sapiens
  misc_feature: Incyte ID No: 2135746CB1
gtctctatatggcggcggctctgtcgggcctggctgtccggctctcgcgctcggccgccgcccgctcctatggggtcttctgcaaggggctgactcgcacgctgctcatcttcttcgacctggcctggcggctgcgtatcaacttcccctacctctacatcgtggcttccatgatgctcaacgtccgcctgcaggttcatattgagatccattgaaggccctcccagactgacgaaggcgtgacctcaggcccaccgcatccaagaacacgaagcatgagggacagaagagggcccctcggcacctgcctggcacaagtgcagcaggccggaggaggtgactcggacaaactatcatgcagccttaagaaaagaatgccggagggcccttggcctgcagatgcaccctcctggatgaataagcctgtggttgatggaaattcacaaagtgaggcattatcactggaaatgagaaaggatccgagcggggctggcctctggcttcacagtggcggcccagtgcttccatatgtgagagaatcagtaagaagaaatccagcctcagcagccactccgagcacagccgtgggtttgttccctgctccaacagagtgttttgctcgggtgtcctgcagtggtgttgaagctctggggcggcgagactggctgggaggagggcccagggccactgacggccacagaggacagtgccccaaaggagagcctcgggtgtcacgactgccacgccatcaaaaactgccggaaatgggaagttttcaggatgacccaccaagtgcttttcccaagggtctgggctctgagttggaacccgcttgcctgcactccatcctgtctgcaacgctgcacatgtatcccgaagtgctcctgagtgaggagacaaaacgcattttccttgaccgtttaaagcccatgttttcaaagcaaacaatagaattcaagaaaatgcttaaaagcacctcagatggtctgcagataacactggggttactggctctgcaaccttttgaattagcaaatacattatgccatagttaaggtacaagcagaacaataccaatagattaattttaagagttgtcttagaatgatttctttcgcattaagtctggatgcaaactgtgcagcccttaggttcctgctgtagttttgtacgacctggcagacttaaagtaaattgagtttaaattcaaagccagttgatgcggaaggaacttttttggcatgtgttaaattgtgctttaaaagacatataaagaattgggaaacatttcaggagacgatcatagcctgtataaataccagattagaacatacggatttaccatgaagttctgtcttcaacatccattctaaagggctactgtcccaaatcctgtgtgtccttttgacttgtctgatcacccaatggaagtggatacttgtaaagtctacaccactgtacttggcgttaaatcttgctgaattcgtggtaagctgttaccatgtctacattttgtagaatgattttggtctgcagcaaaattcgatttcacttctcatacccctttccttccacttgaaatgcaatttagacagaggccctgtggtgaaagttgcaatattaagtttacctttagaagatcccttctcaaactcagaaccctagcagtgttaccttaaacaaaaatgagctcgagaaaaaagtagctcagttacagagaagcaaatcgagttatttcccacataaaaagtttcccagattctaagaattgcagtatcctgtaccctaaaatttttcaaggtgactcctgttgtcgtctgttgataactttaataaaggtcatttaaggacataagtttttaaagactcccaaagtgaaacttaaacattttcgggattatcgattgcatatatcagtttatgctgtgtgctgaattactatgccatgtgctattttagtgtttggggaaaatgaaaaataaaatttgttctttagcttaataaatatgtcttattttataaaaaaaaa

SEQ ID NO: 162 - DNA, 1813 bp, Homo sapiens
  misc_feature: Incyte ID No: 2154810CB1
cagtcctggcccggagcgtcggtcctggtaatctgtaggaaaagcgctgcggcccagggggtaaagagagatcagcctctgtggactcggtgcttctcctggcaagtaaaccccaaggaggactgaccagttcttgaatttctataccatggcccttcgatcagtgatgttcagtgatgtatccatagacttctctccagaagggtgggaatacctggacttggaacaaaaggacttgtacagagatgtcatgttggagaactacagcaacttggtctcactgggatgcttcatttctaaaccagatgtgatttcctcattggagcaaggaaaagagccttggaaagttgtgaggaaaggaagaagacaatatccagatttggagaccaagtatgagaccaagaagttatctttagaaaatgacatttatgaaataaatttatcccagtggaagataatggaaagaattgaaaaccatggccttaagggtctcattttaaaaaatgattgggaatccacaggaaaaattgaaggacaggagagacctcaagaaggatacttcagtagtgtgaaaatgccatctgaaaaggtgtcctcttaccagaaacgcacatctgttactccacatcagagacttcattttgttgataaaccctatgaatgtaaggaatgtgggaaggcgttcagagtgcgccaacagcttacttttcatcacagaattcatactggtgaaaaaccgtatgaatgtaaggaatgtgggatggccttcagacagactgcacaccttactcgacatcagagaattcatactggtgagaaaccttatgaatgtaaagaatgtggaaaggcctttagtcgtggctatcacctttctcaacatcagaaaatccatactggtgagaaaccttttgaatgtaaggaatgtgggaaggcctttagttggggttcaagccttgttaaacatgagagagttcatactggtgagaaatcccatgaatgtaaagaatgcggaaagaccttttgtagtgggtatcaacttactcgacatcaggtatttcacactggtgagaaaccctatgaatgtaaggaatgtgggaaggcttttaattgtggatcaagccttgttcaacatgaaagaatccatacaggggagaaaccctatgaatgtaaagaatgtgggaaggcttttagtcgtggctatcaccttactcaacatcagaaaattcataccggtgagaaacctttcaaatgtaaggaatgtgggaaggccttcagttggggttcaagcctagttaagcatgagagagtccatactaatgagaagtcttatgaatgtaaagactgtgggaaggcctttggtagtggctatcaacttagtgttcatcagagatttcatactggtgagaagctttatcaacataaggaattcgggaagacctttactcgtggctcaaaacttgttcatgagagaactcatagtaatgataaaccctatgagtgtaacgaatgtggggaagcctttctgtggacaacttactcaaatgagaaaattgatactgatgaaaccttatgattgaaagttgtaaaagaatattttgtgtgtgtgtatagacaacttatcataataagaactcttactcttgagaaaccttgtgaatgtaagggttgtgcaaaagccattcatttctgtttatgggcaattatcttgctatccagcaattcatactagtgagaaatattttgaatataactaatatgaaaaggcctttagacttctgtacagtcttattggatatcaatatatactgatgta

SEQ ID NO: 163 - DNA, 738 bp, Homo sapiens
  misc_feature: Incyte ID No: 2228991CB1
gcagcgacctgagaccagtggtcatcgatgggagcaacgtggccatgagccatgggaacaaggaggtcttctcctgccggggcatcctgctggcagtgaactggtttctggagcggggccacacagacatcacagtgtttgtgccatcctggaggaaggagcagcctcggcccgacgtgcccatcacagaccagcacatcctgcgggaactggagaagaagaagatcctggtgttcacaccatcacgacgcgtgggtggcaagcgggtggtgtgctatgacgacagattcattgtgaagctggcctacgagtctgacgggatcgtggtttccaacgacacataccgtgacctccaaggcgagcggcaggagtggaagcgcttcatcgaggagcggctgctcatgtactccttcgtcaatgacaagtttatgccccctgatgacccactgggccggcacgggcccagcctggacaacttcctgcgtaagaagccactcactttggagcacaggaagcagccgtgtccctatggaaggaaatgcacctatgggatcaagtgccgattcttccacccagagcggccaagctgcccccagcgctctgtggcagatgagctccgtgccaatgctctcctctcaccccccagagccccaagcaaggacaaaaatggccggcggccttcaccttcatcccagtccagctctctgctaacagagagtgagcagtgcagcctggatg

SEQ ID NO: 164 - DNA, 1852 bp, Homo sapiens
  misc_feature: Incyte ID No: 2241206CB1
aagctatgaggatactctgttcgtaagctcccggtgaattttgttccacagactcggaagaaaggttggataagagttcactggagattgacaagtactcgggatagtgaaaagccggagttggaacatggatagccgcttgcaggagatccgggagcggcagaagttacggcgacagctcctcgcgcagcagttgggagctgaaagtgccgacagcattggtgccgtgttaaatagcaaagatgagcagagagaaattgctgaaacaagagaaacttgcagggcttcctatgatacctctgctccaaatgcaaaacgtaagtatctggatgaaggagagacagatgaagacaaaatggaagagtataaggatgaactagaaatgcaacaggatgaagaaaatttgccatatgaagaagagatttacaaagattctagtacttttcttaagggaacacagagcttaaatccccataatgattactgccaacattttgtagacactggacatagacctcagaatttcatcagggatgtaggtttagctgacagatttgaagaatatcctaaactgagggagctcatcaggctaaaggatgagttaatagctaaatctaacactcctcccatgtacttacaagccgatatagaagcctttgacatcagagaactaacacccaaatttgatgtgattcttctggaaccccctttagaagaatattacagagaaactggcatcactgctaatgaaaaatgctggacttgggatgatattatgaagttagaaattgatgagattgcagcacctcgatcatttatttttctctggtgtggttctggggaggggttggaccttggaagagtgtgtttacgaaaatggggttacagaagatgtgaagatatttgttggattaaaaccaataaaaacaatcctgggaagactaagactttagatccaaaggctgtctttcagagaacaaaggaacactgcctcatggggatcaaaggaactgtgaagcgtagcacagacggggacttcattcatgctaatgttgacattgacttaattatcacagaagaacctgaaattggcaatatagaaaaacctgtagaaatttttcatataattgagcatttttgtcttggtagaagacgccttcatctatttggaagagatagtacaattcgaccaggctggctcacagttggaccaacgcttacaaatagcaactacaatgcagaaacatatgcatcctatttcagtgctcctaattcctacttgactggttgtacagaagaaattgagagacttcgaccaaaatcgcctcctcccaaatctaaatctgaccgaggaggtggagctcccagaggtggaggaagaggtggaacttctgctggccgtggacgagaaagaaatagatctaacttccgaggagaaagaggtggctttagagggggccgtggaggagcacacagaggtggctttccacctcgataattgttgaagacattgaacctattcatcctcctctaaccttctttattgtaattaaatttcaagtgggagacttaactttagaactcacttccagcttgcactttgctttaatttctctgagctgcaagaatgtcttagcgagccttgcttgcagttgtcacacacactgtccggtttttttcaggataaatgaatgattctgccttttgttatgtgcgtgaacagaatggaacaactcaagtagcttcatcttcagagactgaatttattctgatagacttcagctaattacaaaggattttgctaatttttgggaataaataatggaaaaagatccagtctgtggtatcatgc

SEQ ID NO: 165 - DNA, 960 bp, Homo sapiens
  misc_feature: Incyte ID No: 2259590CB1
cttcgtccgccgttaggttgcggctgctgtggttgccaacgctacactgggtagaacgccagacaggggccacttttcgagaccgagtagagacggacagtgaggaggataggacccacttacacgcttttatgtcagccgcgatcccacccccacaagcgtctgcaaaacccttcctggggccttggcgacagcctgtgtcctcacggcgcgcagaggcggcgccgcgaaccttgtgtgcattttacacgacggcggggactgaggtccctcgcagcccagagccggagcccggggtcggccgagcccgcaggaccggcttcctcgccgactctcacggcctcacccagccccctgggcccatggcggcgccggcgttggcattagtatcatttgaagacgtggttgtgaccttcactggagaggaatgggggcacctggacctggcccagaggaccctgtaccaggaggtgatgctggagacctgcaggctcctggtctcactggggcatcctgttcccaaaccagagctgatctatctactggaacatggacaggaactgtggacagtgaagagaggcctctcccaaagcacctgcgcaggttggtgactgagagtctggcagcgggtatcagggcagcctgcagaccacccaggcatcactgtgtctgaaatgccatgggcagctattttgtggtcttgagcagtcatggagcccttgaccccatggtcccccgtcttcccacttctgtcacacactctttgcctttattcaggttggaatatgttaggtaggagacagattctaggctttaatgatttgccactcactagcctcatgactctggagaggttgtgtgacgtcactgtgcctttggtatataagttaggctgagttaatgaccttctctgaaaaataaactccaaaatcatgtgactcaacagattaaaaaaaaaaa

SEQ ID NO: 166 - DNA, 2718 bp, Homo sapiens
  misc_feature: Incyte ID No: 2307537CB1
gttagatatacagtgcaaagaatctcagaagttggtagaaatccacctgagagaatctgttaaccaggataaggaaagccaagagctccgtaaatctgaggattgtagagaaagtgagatagagacaaacactgaactaaaagaaagggtaaaggagctgtctgaggggatagttgatgagggagcaagtaccagcattggaccccacagcatagatgattctaatttgaaccatggaaacagatacatgtgggagggagaagtaaaacagcccaacttgctaatgattgacaaagaggctgaacagtccaataaattgatgacaggaagtgaaactccaagtaaagtagtgatcaaattgagtccacaggcttgctctttcacaaaggcaaaattagactcatttttatcagaagctaggtctttactcaacccacaagatacacctgtgaaaatttctgccccagagttgctgcttcattccccagccagatcagctatgtgtttaacaggtagtccacaagagcaaggagtttcagttgttagtgaggaggggctagagaattcagctccagaatcagcttctagaacttctaggtacagaagtctcaaactcaagagagaaagatcaaaagactttcaagttaaaaaagatctatgagttggctgtttgggatgaaaacaagaagaggccagagacctgggagagcccagagaaaccaaaaacagaagcactggagctacaagatgtccatccagagttaacagtgacaatagaaagcaaggccctagaagactttgaagctacagacttaaaggtagaggagcttactgccctggggaatctgggggatatgcctgttgatttctgcactactcgggtaagcccagcacatagatccccaactgtcttgtgtcagaaagtgtgtgaagaaaattctgtatcacctatagggtgtaattcctccgatcccgctgacttcgaaccaatcccatctttttctgggtttccgttagattctcccaaaaccttggtgcttgactttgagacagagggtgaacgaaactcacctaatcccaggagtgttaggatcccttctcctaacattttgaaaactggacttacagaaaatgttgaccgtggcttggggggcctagagggaacacaccaggcccttgacctgttagcaggaggaatgatgcctgaggaagtaaaagaatcttcccaattagacaaacaagagtcactcggattggaattaaaaacaattaattctgcaggccttgggccatctccttgccttccagaccttgttgactttgtcacacggacctctggagttcaaaaagataaactgtgttctccactctctgagccaggtgacccttctaaatgtagttccctggagttggggccattacagctagaaatatcgaatgcatccaccacagaggtggcaattctgcaagtagatgatgacagtggcgaccctctgaatttggttaaagctccagtgtcaaggtcccctccaagggagcaggtaattgaagacaatatggtccctcagggaatgcctgaacaggaaactacagttggtgccatccaggaccacacagaatccagtgttcacaactaagaataaatacctagagctacttgtgagtgaatcattggcttctagaaatcagatgcccagatgatccaagactagtttgttatctcatctggaacctacaccaagagatgcagtcagcatcttaaagtaaatgttcatggaagctaaaaaatttacctcctttccttttccctttccccttaaaacaccagacaaatcgataacaacttatatataatatatatatatctgtaaaaatgtattttgttaatttttttggccaatttattttctcccactttgtcattaaaatcacatgtctaactggctcaccacatagtgtgctttgattgtattttggctttgactctgccatttctgaaatgtgggggaggatggaggcagctgacctctccagttgctgtgttgtattcctacccaatttcctgggcagttgatgcatctctgggaaaaacaccagaaagcttgctgaaatggaaaacttggaagaattgttcatctcttaggcttccatttggatgggcctgccttaacattgtttgaaatgcagcgtgagtagctcttttgtttactgtttacaccccttattggcatgtcaactcctgtacttcccttactctgttgcctttcttgagatgcattgtcctgctaacccacaaacctgtttggaaataaacatggaagaatatctggcaggcttacttttagaagacgacaaatcggtaaggcttattcatggttcattgccaggagcagatatgcttttgagatcacttttatttttgaaatggcctttgttcattgtattgtgatccaataacactttgtattaaattgtttagcagccatttgtgttgtgaaggggtagaagatctctgaaacttgtctttagattgaactcattccctgttccacaaacccatatgtatcctttcctctacctcctcctttcccaattaatttcaaccatagtacgatgtttggggttgtatattttgttaaaaagattaaagaatttatgagttggcttggacaagtttaactttatttttaatgtgttaattacttggaataaatgcat

SEQ ID NO: 167 - DNA, 1884 bp, Homo sapiens
  misc_feature: Incyte ID No: 2440675CB1
aaaaacacacagagagacagagcaaaaaggagaagtatctatttgtgcaaagagtcacacagttgacagagtggaggccagtcccgagagaggctttgcagttcccacctcgggaagctccggcagaacccaggcgagggacagctccggacaggtgtggggtgcacactgaaaatgccacgctccttcctggtgaagagcaggaaggctcacacctaccaccagccccgtgtgcaggaagatgaaccgctctggcctcctgcccttaccccggtgcccagagaccaggctccaagcaacagccctgtccttagcactctattcccaaaccagtgcctggactggaccaacctcaaacgagagccggagctggagcaggaccagaacttggccaggatggccccggcaccagagggccccattgtgctgtcccgaccccaggatggggactctccactgtccgactcacccccattctacaagcctagcttctcctgggacaccttggccacaacctatggccacagctaccggcaggccccctccaccatgcagtcagccttcctggagcactccgtcagcctgtacggcagtcctcttgtgcccagcactgagcccgccttggacttcagcctccgctactccccaggcatggatgcgtaccactgtgtgaagtgcaacaaggtcttctccacccctcacgggctcgaagtgcatgtgcgacgctcccatagtgggacccggcccttcgcctgtgacatctgcggcaaaaccttcggccacgctgtgagcctggagcagcacacgcacgtccactcccaggggatcccggccgggtccagtcctgagcctgcacctgaccccccggggcctcatttcctccggcaggagcgcagcttcgagtgccgcatgtgcggcaagaccttcaagcgctcgtccacgctgtccacccacctgctcatccactcagacacgcggccctacccctgccagttctgcggcaagcgtttccaccagaagtccgacatgaagaagcacacctacatccacacaggtgagaagccgcacaagtgccaggtgtgcggaaaggccttcagccagagctccaacctcatcacccacagccgcaagcacacaggcttcaagcccttcagctgtgagctgtgcaccaaaggcttccagcgcaaggtggacctgcggcggcaccgcgagagccagcacaatctcaagtgaggctgcgccggctcccagctcctggccagcctgccctgcggtcctgtcacctggaggccagcctcacatgcccaaatctccagtctcctggaggtgggactggacaggagtctaccagcttgttttgagactcatgaaattgctgtgtgaccttgggcaagtcacttaccctgtctggatcaacatttctcctgctgccaagtgtgggagcctggctgggtctttctcagcagaagttgtttccaggtgtgctcaagtgccttcctctagcagagcacagaaagctagaatacccccagggagacagggatgccaagagtagaccagagctgggacccacagacagaacctccacctgcctgctgcccactgagctgggacctggtcaccttggattttagccggcctctttctggctataacaggcagagtcggagctgcctcccaccccagtcagaagcctggcaccccctctgcttcggccagatgtgctggctgactccgacttccgaccagcactcagctggcctctggggattctagctccacaaccaggccgtgaggctggagaaactggcagttattgctgtcaaaagcctgttctctcaactgctgtcaataaaattaaagatacagaaaaaaaaaaaaaaa

SEQ ID NO: 168 - DNA, 2317 bp, Homo sapiens
  misc_feature: Incyte ID No: 2463542CB1
caatagccagtagtgtgcagcctcattttcttcagagtcagcatctttctttccccttgcaagcagtctcctgtttctatgaatagtctttgctcagacaaggccaatatacttggtaataattaatttagcttctttgaaatgattaggtcactttttggtttaaaagattaccatggttgtccccaaaatctttgcatgtaccaatttatttcctcctccctagggtcagaatgattttatatttggcttatgaaatgtattaatttgcttcttctggtcaaagataaagtggaaggatgatgagatttttaaaaaattaatgtatcccttgcttctaattctacctacaaagtggaatagtgtgctagttactatatagttcccagtgtatagcttttgactcttttgaagtggtaactagtagttttgttttagaattttgctttcagcttttatcctgagagtggggctcactgaacctctctcctttctaaaatctgtggaaattacttttggtaactaaggcactgcagtgatctcagcatttagtatgagaacctatgtttgccatatttgtagtattgcttttacatctttagatatgttccggtcccacatgcaaggaggtgaacatcaaattaaagaatccattgttatcaatctagtgaagaattcaaggaagacacaagactcttaccaaaatgagtgtgcagattacatcaatgtgcagaaagccagaggactagaggccaagacttgtttcagaaagatggaagagagttctttggaaacctgtagatacagagaagtggtcgattccagacccagacatagaatgtttgaacaaagactcccatttgagactttccggacatacgcagcaccatacaatatttcacaagcaatggaaaagcagttacctcattcaaagaagacatatgactctttccaagatgaacttgaagattacatcaaagtacagaaagccagaggactagatccaaagacttgtttcagaaagatgagagagaactctgtggatactcatgggtacagagaaatggttgattctggacccagatcaagaatgtgtgagcaaagattttcacatgaggcttcccagacctaccaacgaccataccatatttcaccagtggaaagccagttacctcagtggctaccaacccattcaaagaggacatatgattctttccaagatgaacttgaagattacataaaagtgcagaaagccagaggactagagccaaaaacttgtttcagaaagataggagatagctctgtagaaacacacaggaacagagaaatggttgatgtcagacccagacatagaatgttggagcaaaagctcccatgtgagactttccagacctattcaggaccatatagtatttcacaagtagtggaaaaccagttacctcattgcttaccagctcatgatagcaaacagagactagattctattagctactgtcaactcaccagagactgtttcccagaaaaaccagtacccttgagccttaatcagcaagaaaataactctggctcatacagtgtagaatctgaagtttacaagcacctctcttcagaaaacaatactgctgaccatcaagcaggtcataaacggaaacatcagaagagaaaacgacacctagaagaaggcaaagaaaggccagagaaagagcagtccaagcataaaaggaaaaagagttatgaagatacagatttagacaaagacaagagcatcagacaaaggaaaagagaggaggatagagtcaaggtcagttcaggaaagcttaagcatcgaaaaaagaaaaaaagccatgatgtaccctccgagaaagaagaacgtaagcacaggaaagagaaaaagaaatctgttgaagaaaggacagaagaggaaatgctttgggatgagtctattcttggattttgaatgtttagttttgtttacccaaggttgaattgaaaaaaaaaaacagtcaatatggatttagaaaaaggaacacctgatgaagaaaaggagaggtagatacagtcagtgtcacttcaggacacttaggttttttttgtataaaaatttaaattgaattaaaagaaggaaaaaaaaagcccaaacttaacctctgagaaaagaacataagaactcaaggagaacataagagaaaaggaaacctgttacagaaaagacaagaatctgtgttttggaatgagtctattcttgggtattgaacttttagttttgtttgcccaaggattaattgaggaaatcagctaagaaaatggactttagaca

SEQ ID NO: 169 - DNA, 1760 bp, Homo sapiens
  misc_feature: Incyte ID No: 2486031CB1
gcggccgcaccgggcagcaaccccactcccactcggaggccccctgccctctcccccacttccccccggcccatggtgcgaggctgggagccgccgcccgggctggactgcgctatctctgaagggcacaaatcagaaggcaccatgcctcctaataaagaggccagcggtctcagtagttcaccagcggggctcatctgcctccctccaatctctgaggagctacagcttgtgtggacccaagcagcccagaccagtgagctagacagcaatgaacacctgctcaaaaccttcagctactttccctatcccagcctagcagacattgcccttctctgcctacgttatgggttgcagatggagaaagtcaagacttggtttatggcccagcgcctccgctgtggtattagctggtcatctgaagaaatagaagagactcgagcccgagtagtctaccgtcgggaccaactccatttcaaatcccttctctcttttactcatcatgcgggacggcccccagaggaggtgcctcctcctccagtgccagctccagagcaagttggtattggaataggtcctccaactcttagcaagcctacccagacgaaaggattgaaggtagagcctgaggagccctctcagatgccaccactgccacagagtcaccagaaattaaaggagtccctgatgacacctggcagtggagcattcccctaccaatcagatttttggcaacatcttcaaagcagtggcctctcaaaggagcaggcaggcaggggtcccaaccagtcacatggcataggtactgcttcctggaaccactccacaaccgtcccccagccacaagctcgggataaacccccaccaattgcattaattgccagtagttgtaaggaggagtcagcatctagtgttactccctcttcttcctctacctcttcttctttccaggtactggctaatggagctactgccacctctaaacccctccagccactaggctgtgtcccacagtcagtgtcacccagtgaacaggcattacccccacatctggaaccagcctggccccaagggctacggcataactcagtaccaggtagagttggccccacagagtacctttccccagatatgcaacgccagcgaaagaccaagcgcaaaaccaaagagcagctggctatccttaaatccttttttttacagtgccagtgggcacggcgtgaggattaccaaaagttagaacagatcactggtttacctcggcctgagatcattcagtggtttggtgacacacgctatgccttgaagcatgggcaactaaagtggtttcgggacaacgcagtacctggtgcccctagtttccaagacccagcaattcctacaccaccaccatcaacccgctccttgaacgaaagggctgagacaccacctctgccgatccctccacccccaccggatatacaacccttggagaggtactgggcagcccaccaacagctacgggaaactgatatccctcaattgagtcaggcatcaaggcttagcacccagcaggtgctggattggtttgactctcgattacctcagccagctgaggtggtagtttgtctagatgaagaagaggaagaggaggaggaagaactgccagaagatgatgaggaagaggaggaggaggaggaggaagatgatgatgatgatgatgatgatgtgatcatacaagactgagtggggagctgggggaggggaggtctgttactgaa

SEQ ID NO: 170 - DNA, 1965 bp, Homo sapiens
  misc_feature: Incyte ID No: 2493052CB1
tttctgccgggtaatggctgcttccaagacccagggggctgtcgcccgaatgcaggaagaccgtgatgggagctgcagcacagtcgggggtgtaggttatggggacagtaaggattgtatcctggagccgctttccctgccagaaagtccaggtggcaccaccactttagaaggttctccatctgtgccttgtattttctgtgaagaacattttcctgtggctgaacaagacaaacttctgaagcacatgattattgagcataagattgtcatagctgatgtcaagttggttgctgatttccaaaggtacattttatattggaggaaaaggttcactgaacagcccatcacagatttttgtagtgtaataagaattaattccactgctccatttgaagaacaagagaattattttttgttatgtgacgttttaccagaagatagaattcttagagaagagcttcagaaacagagactgagagaaattctggaacaacagcagcaagaacgaaatgataccaattttcatggcgtttgtatgttttgcaatgaagaattccttggaaacagatctgttattttgaaccacatggccagagaacatgctttcaacattggattgccagacaacattgtaaactgcaatgaatttttgtgtacattacagaaaaagcttgacaatttgcagtgcttgtactgtgagaagaccttcagggacaaaaatacacttaaagatcacatgaggaaaaaacagcatcgtaagattaatcctaagaacagagaatatgacagattttatgtcatcaattatttggaacttggaaaatcgtgggaagaagttcagttggaagatgatcgggagttgctggaccatcaggaagatgactggtctgattgggaagaacaccctgcctctgcagtctgcttattttgtgaaaagcaagcagaaacaattgagaagttgtatgtccacatggaggatgcacacgaatttgatcttctcaaaataaagtcagaacttggattaaatttctatcagcaagtgaaactggtcaattttattcggaggcaagttcaccaatgcagatgttatggctgccatgtgaagttcaaatccaaagcagacttaagaactcacatggaagaaactaaacacacttcgctgctccccgatagaaagacgtgggatcaactggagtattattttccaacctatgaaaatgacactctcctgtgtacactatctgacagtgaaagtgacctgacagctcaggaacaaaatgaaaatgttcccatcatcagtgaagatacatctaaactgtatgctttgaaacaaagcagtattttgaaccagttgctactataagagtacttgaaaacctagaagaaactaccacagaagcaatttttcatgtttttctcctatgagacagatatgaaagaacaatttaaatttgaacatcaacaaaagattggtccttggtgaaataaacttttcaaaaatgaatgttcttttcaaaaaataaagtagaaaaatgcacttactaagaacatgaaaaaaaaatgaagtaggaaaataagatgaagactttgtattttggctgtaaagttttattgtgtgatcatcttaaattatctcacttcattaaactcataattatatatagaagtatatgtcaattacaaagaaatgaaatgttcaaattatttataaacctgatttttcaatcagtagtttcagtctcctccccaaggaccttcttcatccaacaagttgcaaaatttgaatatcccttctgtactatattgggtgagctgtaaatgtaatgactaaaagaaaagccacagaagaaagaagaactggtcaaagacgtggataatatgcaaattggccattatattagaacaatcaagagctgactgtgttattaccactttctgcctagggtggccaaattccctaga

SEQ ID NO: 171 - DNA, 2086 bp, Homo sapiens
  misc_feature: Incyte ID No: 2512074CB1
actacggatcgcctacaccggggcggagtccaagaactctaggtggacagttacttccgcacacgcgtagtaggacggtagccggtattcaatcttcaaatcagcgccgcgggaagtgcgggcgggtgttgctcccctgtctctggacgacgctgtgactgatcccaggcttggagccggagctgcgagcgaggcagtgaaagggtggcagatttctgtgtaagagctgcagaaaatgatcagcttccaggaatcagtgacattccaggatgtggctgtggatttcactgcagaggagtggcagctgcttgattgtgctgagagaaccctgtattgggatgtgatgttggagaactatagaaacctcatctcagtgggatgtccaattaccaaaacaaaagtgatcctcaaggtagagcaaggacaagagccatggatggtggagggagcgaatccacacgagagctctccagaatctgactacccacttgttgatgaaccagggaagcatcgggaaagcaaagacaattttttgaagtcagttttgctcacattcaataaaattctgactatggagagaatccaccattataatatgagcacaagtcttaatccaatgagaaaaaaatcatataaatcgtttgagaagtgtttgccacctaatttagacttacttaaatataatagaagttatactgtagaaaacgcttatgaatgcagtgaatgcgggaaagccttcaaaaagaagtttcatttcattagacatgaaaaaaatcatacaaggaaaaaaccttttgaatgcaatgactgtggaaaagcctatagcaggaaggcacaccttgcaactcatcagaaaattcataatggagagagaccctttgtgtgcaatgattgtgggaaggcgtttatgcataaagcccaactcgtggtccaccagagacttcacactggagagaagccttatgagtgcagtcaatgtgggaaaacattcacttggaactcctcatttaatcaacacgtgaaatctcatacacttgagaagtcatttgaatgtaaggaatgtgggaaaaccttcaggtatagttcatccctttataaacattccagatttcatacaggagagaaaccctaccagtgtatcatatgtggcaaagcttttggcaacacatccgtgcttgttacacaccaaagaattcatacaggagagaaaccttacagttgtattgaatgtggcaaagccttcatcaagaagtcccatctcctcagacatcagataactcatacaggagagaagccctatgaatgtaacagatgtgggaaagcattttcccagaagtcaaatcttattgtacatcagaaaattcatacataatattcactttatgaatatgagaaggccttattaaatatttgctaaatcttattaaatactaaagaattcatggtgagaagtctacaatttaaatgaatttggaagagtagattcccataaaaaacaaccaatgccaatcatgttctggaagtgataataaactttttacagaaaatatgacagaaaacaactataaataatagagcataaagcttggaaagtaagcataacttaaaaaatcaaagaaccagtgaaaactacatttgccattcctgacttttaatttttataataaaataattatgcaagtgtgagtttaaaatatatgcttatacattatattaaagtatgcctattaacagtttctgcagtaaataacattttttcttccagtctcaacatacataattaatcaagtgagaaaatgtgttttaatatgtcatatgaatttcagtgatattttcatccatttgctggcacttttaatgggcatgacagtgtttctgaatctgagtctcctttaattatacaagtgaagacttcttattaaaattaatataaagatattttcctatgtatgtaaataccagaacaaaaaacaagacactaattgaggagagaaaggcacttgtattctgtattacagtaagtattcagttgaggaaaagaattatttaaatatgtaaataaataatttgcacttcaaaaaaaaaa

SEQ ID NO: 172 - DNA, 1461 bp, Homo sapiens
  misc_feature: Incyte ID No: 2646274CB1
cccacgcgtccgaaatttttcagtgagaaacccctgggtgtgtttgtgtcatgccatatgaataaaaattgcacttctaagaaaagcttttcagttgttatagactttctcagaagctatacattgtaagttccagttctggccgggcgcggtggctcacacctgtaatcccagcactttgggaggctgaggcgggcggatcacctgaggtcgggagttcgagactagcctgaccaacatggagaaaccccgtctctactaaaaatacaaaattagggcaccgtggtttctcatgccaatactggtggaaaaatttccatttgttcgaaaatcagagagaacactggaatgttacgttcataacttactaaggattagtgtatattttccaaccttgaggcatgaaattctggagcttattattgaaaaactactcaagctggatgtgaatgcatcccggcagggtattgaagatgctgaagaaacagcaaatcaaacttgtggtgggacagattccacggaaggattgtttaatatgggattcgcagaggcatttttggaacatctttggaaaaacttgcaggatccaagtaatcctgccatcatcaggcaggctgctggaaattatattggaagctttttggcaagagctaaatttatttctcttattactgtaaaaccatgcctagatcttttggttaactggctgcacatataccttaataaccaggattcgggaacaaaggcattctgcgatgttgctctccatggaccattttactcagcctgccaagctgtgttctacacctttgtttttagacacaagcagcttttgagcggaaacctgaaagaaggtttgcagtatcctcagagtctgaattttgagcggatagtgatgagccagctaaatcccctgaagatttgcctgccctcagtggttaacttttttgctgcaatcacaaagatgaagacttgtggatatggatggtggtgatggttgcacaacaatatcaatttattttataccactgaaccgtgcacttcaaaatggttaagatggtaagttttatgttgtgtattttaccataataaaaaaaattgtagagggaaaaacagtctgcctccacttttgatatgggactgctaacatcttccaccttccgtctccccttctgccccacatctgggcaagctaagaaagcctgctgctctctcctctggcaccagctggaaattcatacccaacaagccctagccttcccaccagacccacatttcatccccatccccatcgcatccccatccccatccccatccctaaccaccataaatgctaagggagtttccttgcctggttttctgaaaccatttttggacctgcttgggaatctgccctgctctctcagaaagcttcattatatgagcaataaaccttttcctaccctcaaaaaaaaaaaaaaa

SEQ ID NO: 173 - DNA, 1066 bp, Homo sapiens
  misc_feature: Incyte ID No: 2672566CB1
actttgtgaaagaaaacattggggtttctttggctgttcttgataagcctataaaaaatgatattttttagttgcttatagttgctgaagtaaaggaaccctgcagccttcccatgctatctgttgacatggaaaacaaggaaaatggctctgtcggtgtaaaaaattccatggaaaatgggagaccacctgatcctgcagactgggccgtgatggatgtcgtcaattatttccgaaccgtgggatttgaggagcaagctagtgcttttcaggaacaggaaattgatggaaaatccctgctattgatgacaagaaatgatgtgttgacaggacttcagttaaaattggggcctgctctgaaaatctacgaatatcatgtaaaacctctgcagacaaagcatttaaagaacaactcttcatagtacagtcaaattggggtcttcgacctcaaaaaatacataatgacataatttagtttcatgtaatgaaactttgtaaacagaatacatacatgtgtatatgtaaagaatttcaatcaaatgaaacgttatcctattggatagactaggcaattcatcagctcacctgaaatcagccaggaggagcaaggacaagatgcgcacagggtggttttcctcatggattttgtcaaatagatgatctttgacacgattagacactcctccccacaaaggctttgaaatcataaggattttcctcatctctttatagctttcccaaaatcttttaaaaaaagaatttaattaaatgacagtcttttggttacagacttaggatgagtaaaaacaagaaaatttggggagggggagaaagaagaaagggattgctgtctcccttgaattcctctgttccttagagcttgtgttacttggacggaattgccaacacccttttttatagagggttctccacttgaccttattaaggttttattgggatatgctgcagtgtttgaaatgaacatgcatcatggccccttcaggagcagaatcatagctctgaaaagagaagctccgttgtgtactgaggatatccatccatattc

SEQ ID NO: 174 - DNA, 1239 bp, Homo sapiens
  misc_feature: Incyte ID No: 2689674CB1
gggacatagaatgggagcaatccaaggactgaggcgcgctgttctgggaccggaggagtggggtttctaggtccaaggggaggctccctaaagcggggcaagcttgaaccaaaagagctggggtttcaggccgctcagtggaggcgaacctcgcccctcgctcccccagcggcgcgtaccagccctgggctgaacgggaggggctctggaacccggagtggccccaccccggtgcgcgggtatggcggccagcctgtggatgggcgacctggaaccctacatggatgagaacttcatctccagagcctttgccaccatgggggagaccgtaatgagcgtcaaaattatccgaaaccgcctcactgggatcccagctggctactgctttgtagaatttgcagatttggccacagctgagaagtgtttgcataaaattaatgggaaaccccttccaggagccacacctgcgaaacgttttaaactgaactatgccacttacgggaaacaaccagataacagccctgagtattccctctttgtgggggacctgaccccggacgtggatgatggcatgctgtatgaattcttcgtcaaagtctacccctcctgtcggggaggcaaggtggttttggaccagacaggcgtgtctaagggttatggttttgtgaaattcacagatgaactggaacagaagcgagccctgacggagtgccagggagcagtgggactggggtctaagcctgtgcggctgagcgtggcaatccctaaagcgagccgtgtaaagccagtggaatatagtcagatgtacagttatagctacaaccagtattatcagcagtaccagaactactatgctcagtggggctatgaccagaacacaggcagctacagctacagttacccccagtatggctatacccagagcaccatgcagacatatgaagaagttggagatgatgcattggaagaccccatgccacagctggatgtgactgaggccaacaaggagttcatggaacagagtgaggagctgtatgacgctctgatggactgtcactggcagcccctggacacagtgtcttcagagatccctgccatgatgtagccaggccaaaggacaagccaggttgcatgatgtgagggagatgagagactcctttttaaaaattgtgaaacctttttggaaatatgatttgtaagattttaataatgactgtttttggagatcaaaaaaaaaaa

SEQ ID NO: 175 - DNA, 2155 bp, Homo sapiens
  misc_feature: Incyte ID No: 2703282CB1
ctcaggggtcagggcatcactggtctcgcgtgcgcgtgaccaggcccggtttccggtgccaggacctttccgaagcgtcgagtggcctaacggtcacagctgtcgcccatcggagaggcaggactactgcgagcagttttaccgcgacctccggaggccggcgtgacaggctctgtcactaaaataggaaccgaatattgtatctgacgcatcctgtaatactgaagagcaactgaagacagttgatgatgtccttattcattgccaggttatatatgatgctctgcaaaacctggataagaagattgatgtgattcgtagaaaggtttcaaaaatccaacgtttccatgcgagatccctgtggacaaatcataagcgatatggatataaaaagcattcttaccggcttgttaaaaagcttaaactccagaaaatgaagaaaaatgaggtttacgagacattctcctaccctgaaagttacagccccactttaccagtgtcaaggcgtgagaataattccccgagcaaccttccaaggccatccttttgcatggaagaataccagcgagctgagctggaggaggacccgatcctcagccgcactccgagtccagtgcatccctcagatttctctgagcataattgtcagccgtattatgcatctgatggtgcaacgtatggttcttcttcagggctctgccttggcaaccctcgggctgacagcatccacaacacttactcaactgaccatgcttctgcagcaccaccttcagttacaaggtcaccagttgaaaatgacggttacatagaggaaggaagcatcactaagcacccttcaacctggtcggtggaagcagtggtcctatttctaaaacaaacagatcctcttgcattatgccctcttgtcgacctcttcagaagccatgaaattgacgggaaggctctgctcctactcacgagtgacgtgttgctgaagcacttgggggtgaagctgggaacggctgtgaagctatgctactacattgaccgacttaaacaaggaaaatgctttgaaaattgaaaaaatccttgtgcaaatttagattgggccaacttctagaggcaccaatgccttcttagtgtggaatcatttttctgccctttagtcgtttttgttttgtagaaagtatctctcaaaatatattatagctagaattgtagaactatgttatagtccagtctacttctttaaaaaccatttaaactgctagatagtattagaatagtccaatagaaaattcattctttataggtctttaaaaattacttttattatattgtttacaaatatatttcatgcaagaaacagaaaaaaaaaaaaaccctttgattctggttcatctcgatacagagaaccaaaacagctaagagaggtattatcagggttgacaactcctatgattgaatctatgggaattattcctcagaagagaatttaaaggtgtacccatatatatctctttctggagtattttatctgtctgatgttgcagtattctacaagtttccagaaagagaatagccatataaattattttcctttctgctattatttctctatatgttttatttattcagatttagagtaaaaaataagcatataaacttttattatgtgctcttaacagttttaagataaactataggatagatagaatggttattttatgcaagaaatattgtaccgcaagggtggtttggatgaagtctgactactttttttcaaacaaactattatattaaaactgtcatattttggctaagtttggacctataactacactttcattgtttgcatctctctatgaagatacgtctgtccaaacttttaaaaggcataactgtattttatgtgtttattctttatatagatagtattttatattttattctcacccgaagtattcacacaatctttttaaaaaaaatttgaaatggcattttgtattgccacagaggtaggatgagccatatattagtgaaatgttttattttgtaaaatataaatggattatttgccgacattagtactctcaacttactttttagagggcgagaaacaatctgtaaaatggtttccatgcagggaaattctcggacctatgcgatggttcta

SEQ ID NO: 176 - DNA, 1687 bp, Homo sapiens
  misc_feature: Incyte ID No: 2738293CB1
ggccgcgctgcactgaggaaggaggtggaggatgcggcgggagtcctccccccctccccgcccgccccgccgccgccgcccgggctgttcctgtaaggcggggagacaatgagtaaactctccttccgagcgcgggcgctggacgccgccaagccgctgcctatctaccgcggcaaggacatgcctgatctcaacgactgcgtctccatcaaccgggccgtgccccagatgcccaccgggatggagaaggaggaggaatcggaacatcatttacagcgagcaatttcagcacagcaagtgtttagagaaaaaaaagagagtatggtcattcctgttcctgaggcagagagcaacgtcaactattacaatcgcttgtacaaaggagagtttaaacagccaaaacagttcattcatattcagcgcatttggggacactaccaaccggagaccacgttaaagtttttgcttgtttgttttgttcatttgtttttggaccacagtattagctttaatttaggctgcagatctgctcaaggttcagttctcaggaagattttttgcttctcctttctacctaagggcaagttgagaaatacaaaattctttgctttccctttctgcatggctaatttatttctttaatcttacactgagggcatagccctttggtaatgtatctttattcagtagcattctatactaatattaacacacaagcataaagcttttttctttcttatggtatatatagtaatgttgtgtctttaattgatggcagtttagatttgatagaattcaataatagtcatattctctagtatgaatattaggttctttgtaatttgttcccgctttctcctttaacgtcatttatttttgctcttcccttcactctgtgtaccatagggactacgaaaattaccctcattcaccttctttcatatttaacatttccttggatgtgctattgaagtcttctttcccttcctatagctcattaaagacttaactcccttatgaaagccaccttgacttttctcactctacctgtcttctttgcttatcgtagtatcttttacatacttctgttagaggactcaccatactttattgcaattatttgtaaccattctttctctccttttagactgtgagctccttgagggcaggaactatatattttattttcttttgtgttttcagagtaaagtgcttggtttatagatgctcaataaatgatgtgtttgtcgactgaattgttttaaaatggctttaaaaagtcttttggtggtacagccattttccacagatttcttttctctgaaatagtctagagaaacacacatgcgaaaattatttatgtatatttttttctcctgtgttctttgactttgagtcctattagctttttgaatttgcctttaccttctatcagtcaggaaggagataactattcataatagaaattttaaggatctctcttaagccaaagtatcaattattttgtattttgataatattgcagttaggcaggaagaccatttgtaaaaaccattctaggaaaccaagaactaaaaatcgggtgtaactcatgtgggtcaggcccatcgaatacaataaacattattcttgtgttggtttttttcatttcattttattctattattgtaaaaaacaataaaaatat

SEQ ID NO: 177 - DNA, 744 bp, Homo sapiens
  misc_feature: Incyte ID No: 2772776CB1
acggcttcgctggtgcagacgcagtgctgagcacacagctaccggacaaagagtgacgcccggagctggagttatggcggctacggagccgatcttggcggccactgggagtcccgcggcggtgccaccggagaaactggaaggagccggttcgagctcagcccctgagcgtaactgtgtgggctcctcgctgccagaggcctcaccgcctgcccctgagccttccagtcccaacgccgcggtccctgaagccatccctacgccccgagctgcggcctccgcggccctggagctgcctctcgggcccgcacccgtgagcgtagcgcctcaggccgaagctgaagcgcgctccacaccaggccccgccggctctagactcggtcccgagacgttccgccagcgtttccggcagttccgctaccaggatgcggcgggtccccgggaggctttccggcagctgcgggagctgtcccgccagtggctgcggcctgacatccgcaccaaggagcagatcgtggagatgctggtgcaagagcagctgctcgccatcctgcccgaggcggctcgggcccggcggatccgccgccgcacggatgtgcgcatcactggctgagcggtggagctgcgggcggccagggccgggcgctctgtgcggactggggccatgatcgggcccgggggcctgagcctgggaccccaccccgtgttaatgaaaaatgagttttggcagcgaaaaaaaaaaaa

SEQ ID NO: 178 - DNA, 1127 bp, Homo sapiens
  misc_feature: Incyte ID No: 2774476CB1
gcgacacagcactggactcgtccagagggcggcgggtgagcggctggggccccgtggagccaccatggaccccgcaggggcagcagacccctcagtgcctcccaatcctttgactcacctgagcctgcaggacagatcagagatgcagctgcagagcgaagccgacaggcggagcctcccgggcacttggaccaggtcatccccagagcacaccaccattctgaggggaggcgtgcgcaggtgcctgcagcaacagtgtgaacagactgtgcggatcctgcatgccaaggtggcccagaaatcatacggaaatgagaagcggttcttctgccccccgccctgtgtctacctctcggggcctggctggagggtgaagccagggcaggatcaagctcaccaggcgggggaaacggggcccacggtctgcggttacatgggactggacagcgcgtccggcagcgccactgagacgcagaagctgaatttcgagcagcagccggactccagggaattcggctgcgccaagaccctgtacatctcagatgcagacaagaggaagcactttcggctggtgctgcggctggtgctgcgcgggggccgggagctgggtaccttccacagccgccttatcaaggtcatctcgaagccctcgcagaagaagcagtcgctgaaaaacaccgatcgtgagcagggcggggcctgacccccggcccgggcggggaggtgcaaccaagcccagaacggctaaactggggcgcggaggtgggggtaggctgggcttaggggtcagagtggaaaaggtggagtcggagccgagaggggaaggagtctggatgagtgggtgcggcccaggcctggggatgagaagagttggaggatgaaaagcagagaggaaagggacagataccaaattccaggttgggagttggggtcccagagcagacaaaagttgaactaggcaggagttgaactagggacagactaaaagtgacataggtggggcacggtggctcatgcctgtaatcccaacaatttgggaggccaaggtgggcggatcagttgatcccagaagttcaagactagctagggcaacatggcgaaatcttgtctgtaccaaaaaaaaaaaa

SEQ ID NO: 179 - DNA, 1408 bp, Homo sapiens
  misc_feature: Incyte ID No: 2804624CB1
gcgcggacccgcccccgcctgcgcaccggcaccgacgcagcgaccagcccagccagacccggcccggcgcggcctgatctaacccagccaggcaggcaatactagcccctctggagcacggagctccttccccaaagacatgaagctattggagaactcgagctttgaagccatcaactcacagctgactgtggagaccggagatgcccacatcattggcaggattgagagctactcatgtaagatggcaggagacgacaaacacatgttcaagcagttctgccaggagggccagccccacgtgctggaggcactttctccaccccagacttcaggactgagccccagcagactcagcaaaagccaaggcggtgaggaggagggccccctcagtgacaagtgcagccgcaagaccctcttctacctgattgccacgctcaatgagtccttcaggcctgactatgacttcagcacagcccgcagccatgagttcagccgggagcccagccttagctgggtggtgaatgcagtcaactgcagtctgttctcagctgtgcgggaggacttcaaggatctgaaaccacagctgtggaacgcggtggacgaggagatctgcctggctgaatgtgacatctacagctataacccagacttggactcagatcccttcggggaggatggtagcctctggtccttcaactacttcttctacaacaagcggctcaagcgaatcgtcttctttagctgccgttccatcagtggctccacctacacaccctcagaggcaggcaacgagctggacatggagctgggggaggaggaggtggaggaagaaagcagaagcaggggcagtggggccgaggagaccagcaccatggaggaggacagggtcccagtgatctgtatttgatgaggaggagccgaggccccagcttcatccagcttcaaccaatgcctggacctgtccacctgagaggcccctggggcctccccagctgctggccagaccctggcgctgccacagtcctggcactgcccaaggccatacctgcctagccctttggctccatcctgtggatgcccactcacccctcagactcctgctgcccatgctgtggccggacttgtcagcagggggcctggtgggaggagcgactgccctgcccaaatgaactgccacagcagggacagctggaccgcagagtttatttttgtatttctactgggcctgcacactccagcccaaagggtctgtggccggaggccccacgagcaggccccagcagtcaccggctctggtcttgggccggccccggtgcccacctgtacccccacctcgcccatttggccgcgtgcactgagtgtcactttgctgcagctcgtttctttccaataaaagtttcgtcgg

SEQ ID NO: 180 - DNA, 1685 bp, Homo sapiens
  misc_feature: Incyte ID No: 2848225CB1
ctagactcagtcgctcgctgagagacgccctggaacgtctgtgtagcctcagtcgctgagagacgccctggaacgtctgtggcagcctctgtcacagtgggacccgcactggcagcgggaggcagagggaggaccctggaacatcccggaagccgggaaatggacgcagtggcctttgaggatgtggctgtgaacttcacccaggaggaatgggctttgctgggtccatcacagaagaatttatacagatatgtgatgcaagaaaccatcaggaacctggactgtataagaatgatatgggaagaacagaatactgaagatcagtacaaaaatcctaggagaaatctaagatgtcatatggtagagagattcagtgaaagtaaagacagtagtcagtgtggagaaacatttagcctcattcgagatagtattgtgaacaacagcatttgtcctggagaagatccatgtcaaagcgctgagtgtgaagaagtcataatgggtcatttatcccttaatagccacatcagagttgattctggacacaaaccacatgagtatcaggaatatggagagaagccacatacacataaacaacgtgggaaagccttcagttaccatcactcctttcagtcgcgtggaaggcctcacactggaaagaaacgctatgagtgtaaggaatgtggaaaaaccttcagttctcgtagaaaccttcgaagacacatggtagtgcaaggtggaaatagaccttataagtgtaagttgtgtgggaaagcttttttttggcccagtttattacgtatgcatgaaagaactcacactggagagaaaccgtatgaatgtaagcagtgttctaaagcctttcctttttacagttcctatcgaagacatgagagaatgcacactggggagaaaccgtatgaatgtaagcagtgttctaaagccttgcctgattccagttcctatataagacatgaaagaactcacactggagagaaaccatatacatgtaaacagtgtgggaaagccttcagtgtttccagttcccttcgaagacatgaaaccactcacagtgcagagaaaccctatgagtgtaagcaatgcgggaaaacatttcatcatcttggaagctttcagatacacatgaaaaggcacactggagatcgacctcataaatgtaagatatgtgggaaaggctttgatcccagtttagttcgatatcatgaacgaattcacactggagagaaaccctatgaatgcaagcagtgtgggaaaacgttatctcatagctcaagctttcgaagacacatgataatgcacactggaggtggacctcataaatgcaagatatgtgggaaagcttttgtttaccctagtgtatgtcaaagacacgaaaagtctcacagtggagagaaaccctatgaatgcaagcagtgtgggaaagcgttatctcatagctcaagctttcgaagacatatggtaatgcatacgggagatgggccgaataaatgcaaggtatgtgggaaagcctttgtttatcccagtgtatgtcaaagacatgaaaagactcactggagagaaacaatatgaatgtaaactattataaagccttctatatttccagttccctttgatatcatgaataaacttacactctgcagaactcagctcccgggtaagggtctatg

SEQ ID NO: 181 - DNA, 1166 bp, Homo sapiens
  misc_feature: Incyte ID No: 2882241CB1
ggggcggacacagggctgggcgttcccgcgggcggggcgtcccgggggcggggcgggcccctgtgtttgttgcaccgtgtcagttactttgtaacaaaagtgctgcagccgcttgctccggccggcaccctaggccggcccgccgccagctgtcgccgacatggaacccttggccagcaacatccaggtcctgctgcaggcggccgagttcctggagcgccgtgagagagaggccgagcatggttatgcgtccctgtgcccgcatcgcagtccaggccccatccacaggaggaagaagcgacccccccaggctcctggcgcgcaggacagcgggcggtcagtgcacaatgaactggagaagcgcaggagggcccagttgaagcggtgcctggagcggctgaagcagcagatgcccctgggggccgactgtgcccggtacaccacgctgagcctgctgcgccgtgccaggatgcacatccagaagctggaggatcaggagcagcgggcccgacagctcaaggagaggctgcgcagcaagcagcagagcctgcagcggcagctggagcagctccgggggctggcaggggcggccgagcgggagcggctgcgggcggacagtctggactcctcaggcctctcctctgagcgctcagactcagaccaagaggagctggaggtggatgtggagagcctggtgtttgggggtgaggccgagctgctgcggggcttcgtcgccggccaggagcacagctactcgcacggcggcggcgcctggctatgatgttcctcacccagggcgggcctctgccctctactcgtgccaggcccacttgccaggcaggagccctccccaagccttcagggctgctcggagtcacctgttggaatggactaaaaggacccttgtgtgggaacaggtgctccccaaacaccctgctgctggctgccaggcaggccctctggaagggaaggggcaggactcatcaggacctccctggacccctgcagggcaggcagcttgggcccgagcccaagcatttggctctgctgcccccaaggggacaggaagcctcttgggcctcttcccttcctggacaaggccccctgcctttgcctcacataaactgtacagtattttcattaaaagcctctttcataaaaaaaaa

SEQ ID NO: 182 - DNA, 1958 bp, Homo sapiens
  misc_feature: Incyte ID No: 2939011CB1
tacttgttgacctcattacatcttgtagcactatggatcacccactgaatgcatgagaagaaataaaggggatatcaaggagttttggcctcaacagtcccagctatctgacttcatgtgaaagatggctaatgcagaagtgagtgtcccagtgggggatgtggttgtggtacctactgaaggaaatgaaggggagaatcctgaagacactaaaacccaagtgattttgcagttacagcctgtgcaacaaggtttgtttatcgatggacacttttacaacaggatttatgaagctgggtcggagaacaacacggcagttgtagcagtagaaactcacacgatacacaaaattgaagaagggattgatacaggcactatagaagcaaatgaggatatggaaattgcttaccccataacttgtggggagagcaaagccatcctcctctggaagaagtttgtatgtccaggaataaacgtgaagtgtgtcaagttcaatgatcagttgatcagccccaagcactttgttcatctggctggcaagtccactctgaaggactggaagagagctattcgtctgggtgggatcatgctcaggaaaatgatggactccggacagattgatttttaccaacatgacaaagtttgctccaatacctgcagaagcaccaaatttgatcttctgatcagcagtgcaagagctccagtgccaggacagcagacaagtgtggtgcagacacccacttcggctgatggtagcatcacgcagattgccatctcagaagagagcatggaagaggcagggctggaatggaactcagctctcaccgctgctgtcaccatggccacggaggagggtgtaaagaaagactcagaggaaatttcagaggacactttgatgttctggaaaggaatagctgatgtagggctgatggaagaggttgtctgcaatatacagaaggaaatagaggagctactcaggggagttcagcagcggctcatccaggctcccttccaagtcacagatgctgctgttctcaacaatgtagcacacacatttggcctaatggacacagtcaagaaggttttagacaacagaaggaaccaagtagagcagggagaagaacagtttctctatactctgacagacttggaacgccagttggaggagcagaagaagcaaggccaggatcacaggctgaaatctcagacagttcaaaatgtggtactgatgcctgtgagcactcctaagcctccaaaaaggccccggctccagcggccagcctccaccactgtcttgagcccttctcctcctgtccagcagcctcagttcacagtcatctcacccatcaccatcaccccagtgggtcagtcattttccatgggcaatattccagtggccaccctcagccagggctccagtcctgtgactgtccacacactgccttctggccctcagctcttccgctatgccacagtggtctcctctgccaagagcagctcaccagacacagtgaccatccacccttcatctagcttggcgctgctgagctctactgccatgcaggatgggagtacactgggcaacatgaccaccatggttagccctgtggaattggtggccatggagtccggcctaacctcggcaattcaggctgttgaaagcacctcagaggatgggcagaccatcattgagattgatccagccccggacccagaagctgaagatactgagggcaaagcagtcatcttggagacagagctgaggactgaggagaaagttgtggctgagatggaagaacaccagcatcaagttcacaatgtggagattgtggtcttagaggattaactggggatctcagggccaggagttatgttttgatttggaattttaattatttgtttatttttatcattgtcccactcatttccacataggacccttttttaaaaaaaaaaaa

SEQ ID NO: 183 - DNA, 2679 bp, Homo sapiens
  misc_feature: Incyte ID No: 2947188CB1
cgaccatccgtccggcatgcggggagcagtccgctacggagctccagcccttctctgagacggggaccaggggatggcagccatgcacctgacagcctggccccagggcctgagctatggaattggccctagggcagcaggaacctattgtttcagaagtcggtgacctttgaggacgtggctgtgtacttcacccaggcggaatgggatggcctgtcccctgcacagaggaccctgtacagggatgtgatgctggagaattatgggaatgtggcctccctgggatttccacttctcaaacctgctgtgatctcacaactggagggaggaggtgagctggggggctcatctccactggctgcaggaacaggcctccagggcctccagactgtagatattcagactgacaatgatttgacaaaggaaatgtatgaaggaaaagagaatgtatcatttgaacttcaaagagacttttcccaggaaacagacttttcagaagcctctcttctagagaaacaacaggaagtccactcagcaggaaatataaagaaggagaagagcaacaccattgatggaacagtgaaagatgagacaagccccgtggaggagtgtttttttagtcaaagttcaaactcatatcagtgtcataccatcactggagagcagccctctgggtgtacaggattggggaaatccatcagctttgatacaaaactcgtgaagcatgaaataattaattctgaggaaagacctttcaaatgtgaagaattagtagagccctttaggtgtgactctcaacttattcaacatcaagagaacaacactgaggaaaagccttatcagtgttcggagtgtggcaaagctttcagcattaatgagaaattaatttggcatcagagacttcacagtggggagaaacccttcaaatgtgtggagtgtgggaaaagcttcagctacagttcccattatatcacacatcagacaatccacagtggggagaagccctatcagtgtaagatgtgtgggaaggccttcagtgttaatggaagcctaagtaggcatcagagaatccatacgggagagaagccctatcagtgcaaggaatgtggaaatggcttcagctgtagttctgcatatattacacatcagagagtccacactggagagaaaccttacgagtgtaatgactgtgggaaagcgttcaatgttaatgcaaaattaattcaacatcagagaatccatactggagagaaaccttatgaatgtaatgaatgtggaaaaggcttcaggtgcagctcccagcttaggcagcatcagagcatccacacaggagaaaagccctatcagtgtaaagagtgtggaaaaggcttcaataataatacaaaactcattcagcatcagagaatccacacaggtgagaaaccctatgaatgcactgaatgtggaaaagccttcagtgtcaaagggaagttaatccaacaccagagaattcacacaggcgagaaaccctatgagtgtaatgaatgcgggaaagccttcagatgtaactcccaatttcggcagcatctgagaattcacactggggagaagccctatgagtgtaatgagtgtggaaaggccttcagcgttaatgggaaactaatgcggcatcagagaattcacactggggagaaaccttttgaatgtaatgagtgtgggagatgctttacttctaaaagaaacctacttgatcatcaccgaatccatactggagaaaagccctatcaatgtaaggaatgtgggaaagccttcagtatcaatgccaaactaactaggcatcagaggatacatactggggagaaacctttcaaatgtatggaatgtgagaaagcattcagctgtagttctaactatattgtgcaccagagaatccatacaggagagaaaccctttcagtgtaaggagtgtggaaaagccttccatgttaatgcccatttaattcggcatcagagaagccacactggggagaaacccttcagatgtgtggaatgtggcaaaggcttcagctttagttctgactacattatacatcagacagtccacacttggaagaaaccctatatgtgtagtgtgtgtgggaaagcattcaggtttagcttccagctcagtcagcatcagagtgtccatagtgaaggaaaatcctaataatgagaaagatatagaaaactcttaaggttaatgccaaaatggatcaagtatcatcagattcatccattgaaaaacctccaagagggcatgaatatggcagagtcttcatatggaaacagtttttattctattcagtttaaatcaggaaaggatgaccagttaaagagaaacatccaaaaatagctttgttttgtaccaacaggaattagaaaatataatgaaaagatttcgttcccagcagcatcaagaaaagtagattttctagaaataaacagttatggaggacttgtatggagaaatttaagtcttcactgagggccactttacaaaggaaatttgaataaatggagagagagagaagccttgttgttggataggaaaacccgtactaaagatactctacctacattaatttatttgtttaatttttgacaacaagcatgtattacttttgaaaagatgaaaaataaagatttatttaatccatccaca

SEQ ID NO: 184 - DNA, 810 bp, Homo sapiens
  misc_feature: Incyte ID No: 3094001CB1
gcgccgcggtagggtgggaacccaagccgggagagccgcgggatttgcggccgccgccatgccgtcgtccccgctgcgggtggcggtggtgtgctcgagcaaccagaaccggagcatggaggcgcacaacatcctcagcaaacggggattcagcgtccgatcctttggaacagggactcacgtgaagcttccaggaccagctcccgacaagcccaatgtttatgatttcaaaaccacatatgaccagatgtacaatgatcttcttaggaaagacaaagaactctatacacagaatgggattttacatatgctggacagaaataagagaatcaagccccggccagaaagattccagaactgcaaagacctgtttgatctgatcctcacttgcgaagagagagtgtatgaccaggtggtggaagatctgaattccagagaacaggagacctgccagcccgtgcacgtggtcaatgtggacatccaggacaaccacgaggaggccaccctgggggcgtttctcatctgtgagctctgccagtgtatccagcacacggaagacatggagaacgagatcgacgagctgctgcaggagttcgaggagaagagtggccgcacctttctgcacaccgtctgcttctactgagcccagcgcccgcatggagccgcctctggagcttcctgttgttcatactttttccttcctgacatttgtttttacttacaggtgttctgctggtgacggtagcattacccaaataaactgtgcatatgaaatgggagaggagatgccaaaacgccagatgaaagcaa

SEQ ID NO: 185 - DNA, 2233 bp, Homo sapiens
  misc_feature: Incyte ID No: 3110061CB1
ctggcggaggccttgctgatgaacctgactgagggtccctggcgatggcagaaatggaccctacacagggccgtgtggtctttgaggacgtggccatatatttctcccaggaggagtgggggcaccttgatgaggctcagagattgctgtaccgtgatgtgatgctggagaatttggcccttttgtcctcactaggttcttggcatggagctgaggatgaggaggcaccttcacagcaaggtttttctgtaggagtgtcagaggttacaacttcaaagccctgtctgtccagccagaaggtccaccctagtgagacatgtggcccacccttgaaagacattctgtgcctggttgagcacaatggaattcatcctgagcaacacatatatatttgtgaggcagagctttttcagcacccaaagcagcaaattggagaaaatctttccagaggggatgattggataccttcatttgggaagaaccacagagttcacatggcagaggagatcttcacatgcatggagggctggaaggacttaccagccacctcatgccttctccagcaccagggccctcaaagcgagtggaagccatacagggacacagaggacagagaagcctttcagactggacaaaatgattacaaatgtagtgaatgtgggaaaaccttcacctgcagctattcatttgttgagcaccagaaaatccacacaggagaaaggtcttatgaatgtaacaaatgtgggaaattctttaagtacagtgccaatttcatgaaacatcagacagttcacactagtgaaaggacttatgagtgcagagaatgtggaaaatcctttatgtacaactaccgactcatgagacataagcgagttcacactggagaaagaccttatgagtgcaacacatgtgggaaattctttcggtacagctccacatttgttagacatcagagatttcacaccggagaaaggccgtatgagtgcagggaatgtgggaaattctttatggacagctccacactcattaaacatcagagagttcacaccggagaaagaccttataagtgcaatgattgtgggaaattttttaggtatatctccacactcattagacatcagagaattcacactggagaaaggccttatgagtgcagtgtatgtggggaattgtttaggtacaactccagccttgttaaacattggagaaatcacactggagaaaggccttataaatgcagtgaatgtgggaaatcatttaggtaccactgcaggctcattagacaccagagagtccacacgggagaaaggccttatgagtgcagcgaatgcgggaaattctttcgttacaactccaacctcattaaacattggagaaatcacactggagaaaggccttacgagtgcagagagtgtgggaaagcctttagccacaagcatatacttgttgagcaccagaaaatccacagtggagaaagaccttatgagtgcagcgaatgccagaaggcctttattagaaagtctcacctggttcatcaccagaaaatccacagtgaagagaggcttgtgtgctccatgaatgtggggaattctttagctaaaactccaacctcattaaacatcagagatttcacaatggagaaagtttaccattgactattgtaattgggtagtaatgttatataaattccacatttttatgcaactaatctccagaacatttttcctcttaccaagaagtaaaatgctgtacccattaacaacaactcattccccttccctacttccccagaaatgtctcaactatatttctatactctatggtacttatatgaggtaccaatagatatctatgaatttgatatatatttgtacctcatataagtggattctacagtatttatcttttgagactggcttatttcacttaggataaggtcttcacggttcacccatgttgtataatgtgtcagaatacccttcctttttaaggtgaaataatatcccaagggtatttataaacccctttttatttaccccattcctccggtaagggggaattctgggggtaatttcccacttttttgccctattggaaaaaaaggccccggctaataaaagttgggtttgacaaaggttgtccatatcccaagatttcccacactttccacaattccttaagtggggggtatttcccccccaggaatatgggggggtccctgggatcaacaagt

SEQ ID NO: 186 - DNA, 2187 bp, Homo sapiens
  misc_feature: Incyte ID No: 3146614CB1
ccgccgcgcgtcgcggaggcacgtgtggagccccggcagcaggagcgtcgcaggtccttggcccttgccagacattagcaccatgagcttcgtggcatacgaggagctgatcaaggagggtgacacggccatcctgtcactgggccatggtgcaatggtggcagtgcgtgtgcagcgtggggcacagacccagacccggcatggtgtcctgcggcactcagttgaccttatcggccgccccttcggctccaaggtgacgtgcggccgaggtggctgggtgtatgtgctgcaccccacgcccgagctctggacgctgaacctgccgcaccgcacgcagatcctctactccacagacatcgccctcatcaccatgatgttggagcttcggcccggctctgtggtctgtgagtctggcaccggcagtggctctgtgtcccacgccatcatccgcaccattgcacccacgggtcacctgcacacggtggagttccaccagcagcgggcagagaaggcccgggaggagttccaggagcaccgtgtgggccgctgggtgactgtgcgcacccaggacgtgtgccgcagtggctttggcgtgagccacgtggccgacgccgtcttcctggacatcccatcaccctgggaggccgtgggccacgcctgggacgccctcaaggtcgaaggcgggcgcttctgctccttctcaccgtgcatcgagcaggtgcaacgcacatgccaggcgctggcagcgcggcggcttctcagagctgagcaccctggaggtgctgccacaggtctacaacgtgcgcactgtcagcctgccaccgcccgacctgggcacaggcacagatggccctgccggctccgacaccagccccttccgcagcggcacgcccatgaaggaggccgtgggccacaccggctacctgaccttcgccaccaagaccccaggctagggggccgcctcccagggcaccagggagctgggagcactgaagggctgggcagggaggccagaggcaccttatatggtcagcgatgcctgccagacacagacggtggggtggggcttgggggcctcctgggtggccagagtgggacagcaggaagggcggctgtgatggaggagcagtgctggggctgggcctcagccattcctgtccagccctgtggcccatcccagctgctgtttgttgccaatatgaagtatccactgccacaggctcccctgggtgttgaagccaaagggtgcaggtgggggagtctgaccccctcccaggtgggcctaagcaggaagggggtggaggagggaggagggcattgaccctgagaccacgctgcgtctgacccctgggcccccacggccctggctgccccacggggcctgagaccatctcgtgcttctccagtccccgggccgaggctccagccttggccagaagctggggtgagctgacccagaatccctgccctgctctccccagcgctaggagaccaggccagcccaggaaccagggaggtgaccctgctctctggcctcctggctgatgtcacagcactgagctcagcccaggccttcgtccactcatgtccaagaggcggggcatcccccacccagccagagcccctgacatgggctgcactcgctgaggccaggcagcgctgcggagaggagcggcagagtgggttgtctgccgcaggcaaccaggcaagtgtgtcggggctggggtgtgaatgccagcctgtgagtcccggaactatgtgggtacccctacccctcacagaagccaagggcatggaggaggtccctccacagtgacaacggtgtggggtaggggaggtgcattcaggacaccacccagggacagtgcctatgtgatcacctcttaaaggctaagcttaggggcatttcccaaagtggggacagagggcaggacgcccaggctgggggctctcctcgcccgccctggtgtctgacagcctcaaggaaggagcagtgcctgtgtcagccatggggcccttggagctgccactggtgcctagggggcctgggtttctgcccaggcagccagtggctgttgggagcctctgtttcccctgtgctgggggccttgagtgctatgctagcaggggcctggccccaagtgtgagtgatgagcaataaacgtaccgtccccctcaaaaaaaaaa

SEQ ID NO: 187 - DNA, 1556 bp, Homo sapiens
  misc_feature: Incyte ID No: 3295381CB1
aggaagggacttcttggctactgatggcaaagctctacgaggcagtgaccttcaaggatgtggctgtgatcttcactgaggaggagctggggctgctggaccctgcccagaggaagctgtaccgagatgtgatgcttgagaacttcaggaacctgctctcagtggggcatcaaccattccatggagatactttccacttcctaagggaagaaaagttttgggtgatggggacaacaagccaaagagaagggaatttgggaggcgagatccaaactgagatggagactgttccagaagcaggaacacatgaagaattttcctgcaagcaaatttgggaacaaattgcaagtgacttaaccgggtctcaagataccaccataagtaactctcagttatttgaacaagatgacaacccctcccagattaaagcaagactatctacagttcacacaagagaaaaacctttccagggtgaaaattgtaaacagttcttcagtgatgtttccttctttgatcttcctcagcagttatattcaggagagaagtctcatacctgtgatgagtgtggaaaaagcttctgttacatctcagcccttcatattcatcagagggtccacatgggagtgaaatgctataagtgtgatgtgtgtggtaaggaatttagtcagagctcacgtctgcaaactcatcaaagagtccacactggagagaaaccattcaaatgtgagcagtgtgggaaaggcttcagatgtagatcagcacttaaagttcattgcaaattacacatgagagagaaaccttataattgtgagaaatgtgggaaggctttcatgcacaatttccagcttcagaaacatcacagaattcatactggggagaagccattcaaatgtgaaatatgtggtaagagcttctgtcttaggtcaagtcttaataggcattgcatggtccacacagcagagaaactgtacaaatctgaaaagtatggaagaggtttcattgataggctagatttgcataagcatcagatgattcatatgggacagaaaccatataattgtaaagaatgtgggaagagcttcaaatggtcctcatatcttttggtccatcaacgagtccacactggagaaaagccatacaaatgtgaggagtgtgggaagggctacattagtaagtcaggtcttgacttccaccatagaacccacacgggagagagatcttataactgtgataactgcgggaagagctttagacatgcttctagtattttgaatcataagaaactccactgccaaagaaagccattgaaatgtgaagactgtggaaagaggcttgtatgccggtcatactgtaaagaccaacaaagagaccacagtggagaaaacccatccaaatgtgaggactgtgggaagcgctacaagaggcgcttgaatctggatataattttatcattatttttaaatgacatataagttatacatatttatggagtgtgaaatttgatacatgtatataatgtgtgctgattaaatcagtttaatttcaaaaaaaaaaaa

SEQ ID NO: 188 - DNA, 2032 bp, Homo sapiens
  misc_feature: Incyte ID No: 3364774CB1
ctcccccgcccgccccgtgcaggctgtggagactcccttcccgggggagggggcccccactgccgcaggtgccccctctgcctccaccccgggctcctggccagaagctggagggggcttggccaaaaagagggagaaacaactcagctgttctttctagctctgaaatagaaaatgtctgcagacggcggaggcatccaggacacccaggacaaggagacacccccggaggttccagatcgtggacatcctcatcaggaaatgccttctaagctgggggaggcggtaccttcaggggacactcaggagtcactgcacattaagatggagcccgaagagccacactccgagggggcatcgcaggaggatggggctcaaggtgcctggggctgggcacccctaagtcacggctctaaggagaaagctctcttcctgcctggcggagccctcccctccccccggatccccgtgctttcccgagaggggaggaccagagaccggcagatggctgcagcgctcctcactgcctggtcccagatgccagtgactttcgaggatgtggccttgtacctctcccgggaggagtggggacggctggaccacacgcagcagaacttctacagggatgtcctgcagaagaaaaatgggctgtcactgggctttcccttcagcaggcctttctgggcccctcaagcgcacggcaagggtgaggcctcgggctccagccggcaggcaggagatgagaaggagtggagaggcgcgtgcacaggagccgtcgaggtggggcagagggtgcagacctcatccgtggcagcccttgggaatgtgaagcccttcagaaccagggcagggagagtccagtggggcgtcccgcagtgcgcgcaggaagcagcctgcggccggagctcagggccggccaaagactccgggcagccggctgagccagatcgcaccccggatgcagctccgccagaccccagtcccacggagccccaggagtaccgcgtcccggagaagcccaacgaggaggagaagggcgccccggagagtggcgaggagggcctggcccctgacagtgaggtgggcaggaagagctaccggtgcgagcagtgcggcaagggcttcagctggcactcgcacctggtgacgcaccggcgcacgcacacgggcgagaagccctacgcctgcactgactgcgggaagcgcttcggccgcagctcgcacctcatccagcaccagatcatccacacgggcgagaagccctacacctgccccgcctgccggaagagcttcagccaccactccacgctgattcagcaccagcgcatccacaccggagagaagccctacgtgtgcgaccgctgcgccaagcgcttcacccgccgctcggacttggtcacccaccagggcacccacacgggcgccaagccgcacaagtgccccatctgcgccaagtgcttcacgcagagctcggcgctagtcacccaccagcgcacccacactggggtcaagccctatccgtgccccgagtgcggcaagtgcttcagccagcgttccaacctcatcgcgcacaaccgcacacacacaggcgagaagccctaccactgcctcgactgcggcaagagcttcagccacagctcgcacctcaccgcgcaccagcgcacccaccgtggcgtgcggccctacgcctgcccgttgtgtggcaagagcttcagccggcgctccaacctgcaccggcacgagaagatccacaccaccgggcccaaggccctggccatgctgatgctgggggcggcggcggcgggggctctggccacacccccacccgctcccacctaggaggccaggaaagggggagcggggcgcccagggccactggaacagccccactggagtcaaggctccgagggaggagagaggggctcgggaagggagctggggcggtgagggcatggggtgaggcatggcgatgggggagggcgagggcgagaaagggcaggcactctgcgaattaaaggccttggacttgaaa

SEQ ID NO: 189 - DNA, 1882 bp, Homo sapiens
  misc_feature: Incyte ID No: 3397777CB1
acctcttcaaccaggagccgagatttctgttgctctgaagccatccaggggtctttaaccagaagagagaggagagcctcaggagttaggaccagaagaagccagggaagcagtgcaatggcttcaaaaatcttgcttaacgtacaagaggaggtgacctgtcccatctgcctggagctgttgacagaacccttgagtctagactgtggccacagcctctgccgagcctgcatcactgtgagcaacaaggaggcagtgaccagcatgggaggaaaaagcagctgtcctgtgtgtggtatcagttactcatttgaacatctacaggctaatcagcatctggccaacatagtggagagactcaaggaggtcaagttgagcccagacaatgggaagaagagagatctctgtgatcatcatggagagaaactcctactcttctgtaaggaggataggaaagtcatttgctggctttgtgagcggtctcaggagcaccgtggtcaccacacagtcctcacggaggaagtattcaaggaatgtcaggaggaactccaggcagtcctcaagaggctgaagacggaagaggaggaagctgagaagctggaagctgacatcagagaagagaaaacttcctggaagtatcaggtacaaactgagagacaaaggttacaaacagaatttgatcagcttagaagcatcctaaataatgaggagcagagagagctgcaaagattggaagaagaagaaaagaagacgctggataagtttgcagaggctgaggatgagctagttcagcagaagcagttggtgagagagctcatctcagatgtggagtgtcggagtcagtggtcaacaatggagctgctgcaggacatgagtggaatcatgaaatggagtgagatctggaggctgaaaaagccaaaaatggtttccaagaaactgaagactgtattccatgctccagatctgagtaggatgctgcaaatgtttagagaactgacagctgtccggtgctactgggtggatgtcacactgaattcagtcaacctaaatttgaatcttgtcctttcagaagatcagagacaagtgatatctgtgccaatttggccttttcagtggtataattatggtgtcttgggatcccaatatttctcctctgggaaacattactgggaagtggacgtgtccaagaaaactgcctggatcctgggggtatactgtagaacatattcccgccatatgaagtatgttgttagaagatgtgcaaatcgtcaaaatctttacaccaaatacagacctctatttggctactgggttatagggttacagaataaatgtaagtatggtgtctttgaagagtctttgtcctctgatcccgaggttttgactctctccatggctgtgcctccctgccgtgttggggttttcctcgactatgaagcaggcattgtctcatttttcaatgtcacaagccatggctccctcatttacaagttctctaaatgttgcttttctcagcctgtttatccatatttcaatccttggaactgtccagctcccatgactctatgcccaccaagctcttgaattttctcatttcttcacctacaaccctttgtctcgacttatctcctgcaactgactcatctgcaacattcacaccattgcttccttgtggtttcccttctttagaacttttactcatccttgagatgtatggtgtatttggcttgagttatgagagatgcttatttattcatttactctttttcatattttcagagaaagttacctaatccctcctaaagacacagcagtatgggtataacatccttgccttcccatttatccatgtttcactttatcactgatgtgaagaggccaa

SEQ ID NO: 190 - DNA, 784 bp, Homo sapiens
  misc_feature: Incyte ID No: 3403046CB1
gccccacgggcagggacgcgcaggcggggcggggcgggccgggccagaggagcgcccggcatgtcgcaagggctcccggccgccggcagcatcctgcagaggagcgtcgcggcgcccgggaaccagccgcagccgcagccgcagcagcagagccctgaggatgatgacaggaaggtccgaaggagagaaaaaaaccgagttgctgctcagagaagtcggaagaagcagacccagaaggctgacaagctccatgaggaatatgagagcctggagcaagaaaacaccatgctgcggagagagatcgggaagctgacagaggagctgaagcacctgacagaggcactgaaggagcacgagaagatgtgcccgctgctgctctgccctatgaactttgtgccagtgcctccccggccggaccctgtggccggctgcttgccccgatgaagccggggacactcctctgcccagcaaggagccttggtcattttcatacctgggaggaaggcttttccttcacaattgtatacagggggcacctgtggccaggcctcctcctgggagctccaggaccagccagctgtgttccctgcagactgggctcagcccgacatccaacaggcgccaaactcacagagcccttgtgcagatccagcatggaggccaccctcaggagtgacttctcatccaccctggcagctagtaggttctgctgttatgcagagccatttcctctagaatttggataataaagatgcttattgtctctcccttctccaaaaaaaaa

SEQ ID NO: 191 - DNA, 1771 bp, Homo sapiens
  misc_feature: Incyte ID No: 3538506CB1
gcaaaagggacagccacggggaagaaaggcagtccagggtgaagccctgaatatggggaggggttggggctggggagtagccccctctccacctcaggcagtcctgtcctctctccacagtggccaactttgacccaggcaccttcagcctgatgcgctgtgacttctgcggggctggcttcgacacacgggccggcctctccagccacgcccgggcccacctacgtgacttcggtatcaccaactgggagctcactgtctcacccatcaacatcctgcaggagctgctggccacctctgctgctgagcagccccccagccccctgggccgagagcctgggggtccgcctggcagcttcctgacctcccgtcggccccgcttacctctcacggtgccctttccacccacctgggctgaggaccctgggccagcctatggagatgcctcaggcccagagccagcacgagacatccgctgcgagttctgtggtgagttcttcgagaaccgcaagggcctctcgagccacgcgcgctcccatctgcggcaaatgggcgtgaccgagtggtacgtcaatggctcgcccatcgacacgctgcgggagatcctgaagagacggacccagtctcggcctggtggacctcccaacccaccagggccaagcccaaaagccctggccaagatgatgggcggcgcaggtcctggcagctcactggaagcccgcagcccctcggaccttcacatctcacccttggccaagaagttgccaccaccaccgggcagccccctgggccactcaccaactgcctctcctcctcctacggcccgaaagatgttcccaggcctggctgcaccctccttgcccaagaagctgaagcctgaacaaatacgggtggagatcaagcgggagatgctgccgggggcccttcatggggaactgcacccatctgagggtccctggggggcaccacgggaagacatgacacccctgaacctgtcgtcccgggcagagccggtgcgcgacatccgctgtgagttctgcggcgagttcttcgagaaccgcaagggcctgtcgagtcacgcgcgctcacacctgcggcagatgggtgtgaccgagtggtccgtcaatggttcgcccatcgacacactgcgagagatcctcaagaagaagtccaagccgtgcctcatcaagaaggagccaccggctggagacctggcccctgccctggctgaggacgggcctcccaccgtggcccctgggcccgtgcagtccccactgccgctgtcgcccctggctggccggccaggcaaaccaggtgcagggccggcccaggttcctcgtgagctcagcctgacgcccatcactggggccaagccctcagccactggctacctgggctcagtggcagccaagcggcccctgcaggaggaccgcctcctcccagcagaggtcaaggccaagacctacatccagactgaactgcccttcaaggcaaagacccttcatgagaagacctcccactcctccaccgaggcctgctgcgagctgtgtggcctttactttgaaaaccgcaaggccctggccagccacgcacgggcacacctgcggcagttcggcgtgaccgagtggtgcgtcaatggctcgcccatcgagacactgagcgagtggatcaaacaccggccccagaaggtgggcgcctaccgcagctacatccagggcggccgcaagcttattccctttagtgagggttaattttagcgtgcacaggccgt

SEQ ID NO: 192 - DNA, 1764 bp, Homo sapiens
  misc_feature: Incyte ID No: 3575519CB1
aggagaaggaagccaacaggatccgacccggtgttttgtgacaaaggcaagacccccaggtctacttagagcaaagttagtagaggaggcagctaggcgtggctctcattccttcccacagaatggattataagtcgagcctgatccaggatgggaatcccatggagaacttggagaagcagctgatctgccctatctgcctggagatgtttaccaagccagtggtcatcttgccgtgccagcacaacctgtgccggaagtgtgccaatgacatcttccaggctgcaaatccctactggaccagccggggcagctcagtgtccatgtctggaggccgtttccgctgccccacctgccgccacgaggtgatcatggatcgtcacggagtgtacggcctgcagaggaacctgctggtggagaacatcatcgacatctacaaacaggagtgctccagtcggccgctgcagaagggcagtcaccccatgtgcaaggagcacgaagatgagaaaatcaacatctactgtctcacgtgtgaggtgcccacctgctccatgtgcaaggtgtttgggatccacaaggcctgcgaggtggccccattgcagagtgtcttccagggacaaaagactgaactgaataactgtatctccatgctggtggcggggaatgaccgtgtgcagaccatcatcactcagctggaggattcccgtcgagtgaccaaggagaacagtcaccaggtaaaggaagagctgagccagaagtttgacacgttgtatgccatcctggatgagaagaaaagtgagttgctgcagcggatcacgcaggagcaggagaaaaagcttagcttcatcgaggccctcatccagcagtaccaggagcagctggacaagtccacaaagctggtggaaactgccatccagtccctggacgagcctgggggagccaccttcctcttgactgccaagcaactcatcaaaagcattgtggaagcttccaagggctgccagctggggaagacagagcagggctttgagaacatggacttctttactttggatttagagcacatagcagacgccctgagagccattgactttgggacagatgaggaagaggaagaattcattgaagaagaagatcaggaagaggaagagtccacagaagggaaggaagaaggacaccagtaaggagctggatgaatgagaggcccccagatgcagagagactggagagggtggggaggggcccagcggcccttggtgacaggcccagggtgggaggggtcggggcccctggaggggcaatggggaggtgatgtcttctctctgctcagagagcagggactagggtaggaccctcaccgctgcgtccagcagacactgaaccagaattggaaacgtgcttgaaacaatcacacaggacacttttctacattggtgcaaaatggaatattttgtacatttttaaaatgtgatttttgtatatacttgtatatgtatgccaatttggtgctttttgtaaaggaacttttgtataataatgcctggtcattgggtgacctgcgattgtcagaaagaggggaaggaagccaggttgatacagctgcccacttcctttcctgagcaggaggatggggtagcactcacagggacgatgtgctgtatttcagtgtctatcccagacatacggggtggtaactgagtttgtgttatatgttgttttaataaatgcacaatgctctcttcctgttcttcaaaggaaaaaaaa

SEQ ID NO: 193 - DNA, 2923 bp, Homo sapiens
  misc_feature: Incyte ID No: 3598694CB1
tgtccaatcctgagatgctgtcacagatcatggagaaccccctggtccaggatatgatgtctaaccctgatctgatgcgtcacatgattatggccaacccccagatgcagcagttgatggagcggaaccctgagatcagccacatgctcaataaccctgaactcatgaggcagacaatggagcttgctcggaatccagccatgatgcaagagatgatgcggaaccaggaccgggccctgagcaaccttgagagcatccctggagggtataatgccctccgccgcatgtacacggacatccaggagcccatgttcagtgctgcccgggaacagtttggcaacaatcccttctcttccctggccgggaactccgacagctcatcctcccagcctctgcggactgagaatcgagagcccctccctaacccctggagcccctcgccccccacctcccaggcccccgggtccggtggggagggcaccggaggatcggggaccagccaggtgcacccgacagtctcgaacccctttgggatcaatgcggctagcctggggtcagggatgttcaatagcccagaaatgcaagccctcctccagcagatctctgagaacccccagctgatgcagaatgtgatctcagcaccctacatgcgcagcatgatgcagacgcttgcccagaaccccgactttgctgctcagatgatggtgaatgtgccgctcttcgcggggaacccccaactgcaggagcagctccgcctgcagctcccagtcttcctgcagcagatgcagaacccagagtcactctccatccttaccaatccccgagccatgcaggcattgctgcagatccagcagggactacagaccttgcagaccgaggcccctgggctggtacccagccttggctcctttgggatgtcccggaccccagcaccctcagcaggcagcaacgcagggtctacgcccgaggcccccacttcctcaccagccacgccagccacatcttctccaacaggggcttccagcgcccagcagcaactcatgcagcagatgatccagcttttggctggaagtggaaactcacaggtgcagacgccagaagtgagatttcagcagcagctggagcagctcaactccatgggcttcatcaatcgtgaggctaacctgcaggccctgattgccacaggaggggacatcaacgcagctatcgagagactgctgggctcccagctctcctaatccctcggcccatgcctcctgcctctcccctccctcgatgtcagcattcggttcttctgtcaatccttaccctctgcagcttgtcctcccttccgtcttctccctcatcctttccaaacagcagggtgactttagaggcatgggctccaaccccttagctctgtctgagaattatggttttactgctacgtctctaacagactcttctctcctggtctccttgagcagtgctacttaaacagttttcacagtttcattgattgactctacctccttgccccacaccacttttgcaatctttaaactttcagtggctgtgcagagtcgagggaggaaccagctctctggtttactggaacatagtcttccatctataccactagggttttgtcttatgtttacttttggtaactctcttccttctttttctccctaccccccaacccctagcccaaccaatgctagaatttcttgctctgaaggaggagcaggtgaaacaggtggtaattttccttctcggcccctattctggttcattcagcactttttggtgggaactgttggaaattccagggtaaggaggaagatgcctgttctccctgtctgaagagggagatgagacagctctctggacaggaattaacaaacgctggagcagcccagaggaaattcgtgtgaaagaggagggaatgagattattcggaggaagggaatgggggagacagcctgagtaaaaggcttggaagttggaattaacagtggggagcagaagcactcatagctcttttaggcagaagaatccaggcccgagctggcagaagagacttagagatgctaatggaatttaaactgaaaaaaggagcccaatgaagctaagcgccacgccccacaaggggtcatattggctttagttcctcaagcatatgtgcttatatgcacacacacacacatttccatggacccaggtcttgcttgtgtccccaggcaccagtagtttgagcccccctcaaaagacatgaagggggttggggtctgtgtgagtagtggggaggtgcatgtgtatccacatgtgtgcatacactcttaagttgggtgggaagtggattccttgttggtttctggttcagagtgctctcccaccaccagagacaagtgggtaaaaaggtcagtccattgcaggaatatatatccgggagagctaggtcccttggggctctggatgctgggtaacccagaggtaatgtgggtaccctttctgaagctgtcagggctgtgactagcacccttatcacccctcactgccttgtgggaatagtagagggttttttttcctccagagcccctggcctttcagttcttaactatttccctccaggccagaaagttttctttgaggaaggagaggagagggtggcaatgatgcctttgatctggaattggacatttctctgtcagagcacagaggaggctcatatcacctcttccctctcctacttggcccagctgcttggaggaccgaccccatggctgagaatatgacggcaagaggaacagagtttgctccaagtgggaaagggtcccaagcagtccagagaagatgtctgtgtggctttccctccctgcctcccccagctcccacactggcctttgtaaataaatggcgtggtctttgttgtgaaaaaaaa

SEQ ID NO: 194 - DNA, 1567 bp, Homo sapiens
  misc_feature: Incyte ID No: 3638819CB1
  unsure 1255: a, t, c, g, or other
ttcccctggcgggtgggtactatggcctcagcacatactgggtttgaggccccaggccaagatttgagcctgaaagttggggtttgagtcccgaagccctgggcttgtgccccccagccctgagtttgcacccagaagccctgaatcagattctcagagccctgagtttgaatcccagagccctaggtatgaaccccaaagccctggctatgaacctcggagccccgggtatgaaccccggagccctggctatgaatctgagagctctagatatgaatcccagaacactgagctcaaaacccaaagcccagaatttgaagctcaaagttccaaattccaggaaggtgcggagatgcttctgaaccccgaggaaaagagtcctttgaatatctccgtaggagttcaccccctggactccttcactcaggggtttggggagcagcccacaggggacctgcccatagggccaccttttgagatgcccacaggggccctgctgtctacaccgcagtttgagatgcttcagaatcccctgggtctcacaggagcccttcgaggtccaggtcggcggggtggccgggccaggggtgggcagggccctcggcctaacatctgcggcatctgcgggaagagcttcgggcggggctccaccccgatccagcaccagcgcatccacaccggtgagaagccctacaaatgtgaggtctgcagcaaggccttctcccagagctctgacctcatcaaacaccagcgcacccacactggcgagcggccctacaaatgtccccgttgcggcaaggccttcgccgacagctcttacctgcttcgccaccagcgcactcactctggccagaagcccttcaagtgcccacattgtggcaaggccttcggcgacagctcctacctcctgcgacaccagcgcacccacagccacgagcggccctacagctgcaccgagtgcggcaagtgctatagccagaactcgtccctgcgcagccatcagagggtgcacaccggtcagaggcccttcagctgtggcatctgcggcaagagcttctcccagcggtcggcccttatcccccatgcccgcagccacgcccgggagaagcccttcaagtgcctgagttgcgcaaacgttttggcagagctcggtgctggcaatccacgcccgcaccccctggggggtgggcgtggttggggggggttgtgtgggggtgtggtggggtggggtgggtgtggtggggagtggggtggngttggacatggggttggcggcgtgttgggggttgttggggttttttgctttttttttgctttttggctattttgtttctatccttttcgatggctttttttcccgcggaaccctttcgggtctctctctttttggtttccccctgtttgacgagccccaacccgagaaacgccttaaccttggtctacctggattctccatcgttcttcattcttcctctctatcttccccttgttctcttttctcttccccctttctgtgttctttttattttttctctcttgtctctctccttcgcttcctcctctcttc

SEQ ID NO: 195 - DNA, 1644 bp, Homo sapiens
  misc_feature: Incyte ID No: 3717139CB1
ggttttcccacatggtggtgccaaagaatcttagaatgtttgtgttttaaatttttaaatttttttttgtgtgtgcgtgtgtgtgtgtgttcgtgtggatgcacgtgtggccccgctgggtgccccctccagtgtccccggagctgaaagatcgcaaagaggatgcgaaagggatggaggacgaaggccagaccaaaatcaagcagaggcgaagtcggaccaatttcaccctggaacaactcaatgagctggagaggctttttgacgagacccactatcccgacgccttcatgcgagaggaactgagccagcgactgggcctgtcggaggcccgagtgcaggtttggtttcaaaatcgaagagctaaatgtagaaaacaagaaaatcaactccataaaggtgttctcataggggccgccagccagtttgaagcttgtagagtcgcaccttatgtcaacgtaggtgctttaaggatgccatttcagcaggttcaggcgcagctgcagctggacagcgctgtggcgcacgcgcaccaccacctgcatccgcacctggccgcgcacgcgccctacatgatgttcccagcaccgcccttcggactgccgctcgccacgctggccgcggattcggcttccgccgcctcggtagtggcggccgcagcagccgccaagaccaccagcaagaactccagcatcgccgatctcagactgaaagccaaaaagcacgccgcagccctgggtctgtgacgccaacgccagcaccaatgtcgcgcctgtcccgcggcactcagcctgcacgccctccgcgccccgctgcttctccgttacccctttgagacctcgggagccggccctcttcccgcctcactgaccatccctcgtcccctatcgcatcttggactcggaaagccagactccacgcaggaccagggatctcacgaggcacgcaggctccgtggctcctgcccgttttcctactcgagggcctagaattgggttttgtaggagcgggtttgggggagtctggagagagactggacaggggagtgctggaaccgcggagtttggctcaccgcaaagctacaacgatggactcttgcacagaaaaaaaaatcttgttaacaatgaaaaaatgagcaaacaaaaaaatcgaaagacaaacgggagagaaaaagaggaagggaacttatttcttaactgctatttggcagaagctgaaattggagaaccaaggagcaaaaacaaattttaaaattaaagtattttatacatttaaaaatatggaaaaacaacccagacgattctcgagagactggggggagttaccaacttaaatgtgtgtttttaaaaatgcgctaagaaggcaaagcagaaagaagaggtatacttatttaaaaaactaagatgaaaaaagtgcgcaggtgggaagttcacaggttttgaaactgacctttttctgcgaagttcacgttaatacgagaaatttgatgagagaggcgggcctccttttacgttgaatcagatgctttgagtttaaacccaccatgtatggaagagcaagaaaagagaaaatattaaaacgaggagagagaaaaataatggcaaaactgtctggactgctgacagtaaattccggtttgcatgg

SEQ ID NO: 196 - DNA, 1817 bp, Homo sapiens
  misc_feature: Incyte ID No: 3892962CB1
gccggtgagtgtggctgcggggtcgcgcccaccctctacctgtgccgggggccggaacctggccccggggagggcgcggcctcggggagacggcgtgcaggcccagcactgttggtcacgcagcctgtcttcctattcaccgtgggcagcagagggatggctgctcagctgctgactgatgaggcactgactgggagactagacctgaaatgaaagagttggatccaaagaatgacatttcggaagacaagctctccgttgttggggaggccacggggggacccacgaggaatggtgccaggggtcctggctcagaaggagtgtgggaaccaggcagctggccagagaggccgcggggagatgcaggtgcagagtgggagccattgggaattccccaggggaacaaactcttagggggctcagtacccgcatgtcatgaactgaaggcatttgccaaccaaggctgtgtcctggtcccaccacggctggacgaccccacagaaaagggggcctgtccacccgtaaggcgtggcaagaacttctccagcacttcagacctcagtaagccccccatgccctgcgaggagaagaaaacctacgactgcagcgagtgtggcaaggcctttagccgaagctcgtccctgataaagcaccaaaggatccacacgggagaaaagccgtttgagtgtgacacctgtgggaagcacttcatcgagcgctcgtccctcaccatccaccagcgggtgcacacgggcgagaagccctatgcctgcggggactgcggcaaggccttcagccagcgcatgaacctcactgtgcaccagcgcacgcacacgggcgagaagccgtatgtgtgcgacgtgtgtggcaaggccttccggaagacttcctctctcacccagcacgagcggatccacacgggggagaagccctacgcgtgcggggactgcggcaaggccttcagccagaacatgcacctcatcgtgcaccagcgcacgcacaccggggagaagccgtacgtgtgccccgagtgcgggcgagccttcagccagaacatgcacctgaccgagcaccagcgcacgcacaccggggagaagccgtacgcctgcaaggagtgcggcaaggccttcaacaagagctcctcgctcaccctgcaccagaggaaccacaccggcgagaagccctacgtgtgcggcgagtgcggcaaggccttcagccagagctcctacctcatccagcaccagcgcttccacatcggcgtgaagccgttcgagtgcagcgagtgcggcaaggccttcagcaagaactcctcgctcacgcagcaccagcgcatccacaccggcgagaagccctacgagtgctacatctgcaagaagcacttcacggggcgctcgtccctcatcgtgcaccagatcgtgcacaccggggagaagccctacgtgtgcggcgagtgcggcaaggccttcagccagagcgcctacctcatcgagcaccagcggatccacaccggcgagaagccgtacaggtgcggccagtgcgggaagtccttcatcaagaactcctccctcactgtgcaccagcggatccacacgggcgagaagccctaccgatgcggcgagtgcgggaagaccttcagccgcaacacgaacctgacgcgccacctgcggattcacacctgagcgcctctgtgcagggctctcactggcggtgcccaggacggacgccagatggctgcgcgctttgtcagcagtgctgtgagaagttctcccctggggtggggactcggggtcaggggagctcaggaatgtggtgttgtg

SEQ ID NO: 197 - DNA, 2836 bp, Homo sapiens
  misc_feature: Incyte ID No: 4153521CB1
gtgccgtgacaatacggctcactatagggcgcattcggaccgggccctttttccgccgttacccgctcaccagctacgcggcgcgtcaggtccgcggaggcgcgggctcggggcgcctgcgggacggtgaggccctgctgaggactccggcaagtgtgggtcgcggcgacggcggggctaaggccctgggtccgcgcgcggtttgaccacggccggggccttgggcatttcctggccttcctgttgagccgtgtaaacgcggggtgatgacggcgccgacctcttggcactgttgtgagaccgaagtgggcgcgagagcagacgccagctacagttttttttgggttatgtcgtcatgaagccggcgctttcagttgtgcaaccttgaacaaatgggacactgcccatctctaagataagaacctggaaaggggactctgttggccattggaaattgcagaataatgtctcaggtgacatttagtgatgtggctatagacttctctcatgaagagtgggcatgcctagattctgctcagagggacttatacaaggatgtgatggtccagaattatgagaacctggtctctgtaggtctttccgtaactaagccatatgtgatcatgttattggaggatggaaaagagccctggatgatggagaaaaaactgtcaaaagattgggaatcaagatgggaaaacaaggaattatcaacaaagaaggatatttatgatgaagattcaccccaaccagtaacaatggaaaaagttgtaaaacaaagttatgaattttcaaattctaataagaatttggaatatacagaatgcgacacatttagaagcacctttcattcaaagtctactctttctgaaccacaaaacaattctgctgaagggaattcacacaaatatgatatattaaagaagaatttatcaaaaaagtcagttataaaaagtgagagaataaatggtggaaagaaacttttaaattctaataaaagtggggcagccttcaaccagagcaaatctcttacccttccccagacttgtaatagagagaaaatctatacatgcagtgaatgtgggaaagcctttggcaaacagtcaatcctcagtcgccactggagaattcatacaggagagaagccctatgaatgtcgtgaatgtgggaagacttttagccatggttcatcccttacacgacatcagataagccatagtggagagaaaccttacaaatgcattgaatgtgggaaggcctttagccatggctcatcacttactaaccatcagagcactcacacgggagagaaaccgtatgaatgtatgaactgtggaaagtcttttagtcgtgtgtcccttctcattcagcatctaagaattcatacgcaagaaaaacgctatgagtgtcgtatatgtggaaaggccttcattcatagttcgtctctcattcaccatcagaaaagccatactggagagaagccttatgaatgtagagaatgtgggaaagctttctgctgtagctcacaccttactcaacatcaaagaattcacagtatgaagaaaaaatatgaatgcaacaaatgtctcaaggtctttagtagcttctcatttcttgttcaacatcagagtattcatactgaagaaaaaccgtttgaagtttagaaatgcaggaaatccttcaaccagcttgaatcactgaatatgcatttgagaaatcacattagattgaaaccctacgaatgcagtatatgtgggaaagcctttagtcataggtcgtccctgcttcaacatcacagtattcatactggagagaaaccttacgaatgtattaaatgtgggaagaccttcagctgtagttcaaaccttactgtacatcagagaattcatactggagaaaagccatataaatgtagtgagtgtgggaaagcttttagcaaaggctcgaatcttactgcccatcaaagagtacataatggagagaaacccaatagtgtggtaagtgtggaaaagcctttagatcatatgaatccctatacatgtgagaaatcttacagaagagaagcagtgtttatcacggtaaacttcattcatagatcctcccttatttaacatcagaaaaatgtatactggggaaaagttgtatgaaggtggtgaacatgggagacttttagcaatgatgcagatttttttattagagtttatactgtagagaaatcatatgaagtcaataaatgtgggaaagcctttgtcagtattaatcccttaattgacctaagtatactcacactaggaaaaatctgtgtacatgtagcaaatgtgggaaagactataggcaataggaatctcctgcaaactcctacaggagaaaagttgtatgaatgtggaaactttagaaattgaaggaatttttcagttccaagtgcatcccttattctataggaaataaactggagacaaatctcatttaagagatgcagcaaagtgttcactaagagtgtttatcttgccagacataagaagatgaatggtagagcaacctgaaggatttagaaattacatataaatctttgcagttatgctatttgtaaacaggattatataggagagcaaataaacataagtatgcatttcttagagcagtagcttgcagtttcagttgagttctacttagaaattctttttagctagtgggcatgtgaagatatttagtcacccagaggagccagtaaatgttataatgttaaaaattaaagctgcaaaagaaataaaatggtgttaataaaaatttggcatctaataaaatcattttgtatatcaaaaaaaaaaaaaaaaaa

SEQ ID NO: 198 - DNA, 1434 bp, Homo sapiens
  misc_feature: Incyte ID No: 4585038CB1
cggacggtgggcggacgcgtgggtcttaactaatgtttgctccaataactaggcactggacattatagctctatgcatggattaaaagaagaagtgtcgtttcccaaacataaaacagaatttgctacttgtgtgctgttggggattcatgattattctgtccatagagagggtactttttcagaaatccggaaatagtatggaaccctcaaataaataagcagctgaggagtttggtgttacggagtgtgttgtatttttacaggtgccactgattaatgaacttgaatcagcaatacatcagctgtacaaacagcgagcttcccgccttgtccaaagacgacaagatgatattaaagatgaatcttcggagttttcaagccattcaaacaaagctctgatggcaccaaatcttgactcctttggacgcgatcgggcactgtatcaagagcatgcaaaacgtcgcattgcagagcgggaggccaggaggactcgtcgtagacaagccagagaacaaaccggtaagatggcagatcaccttgaaggcctttccagtgatgatgaagaaacttctacagatattactaatttcaatctggaaaaagatcgaatttcaaaagaatccggcaaagtttttgaagatgtccttgaaagtttctattcaattgactgtattaaatcacagtttgaagcatggcgttcaaaatactacacatcctacaaagatgcttacattggcctttgtttgccaaaattattcaaccccctcatacgacttcagctcctcacttggactcctcttgaggcaaaatgtcgtgactttgagaatatgctgtggtttgaatctttgctgttttatggttgtgaagaacgagagcaagaaaaagatgatgtagatgttgccctactacctaccattgtggaaaaggtgattcttcctaaactaacagtgatagctgaaaatatgtgggaccctttttctacaacacagacttcaagaatggtgggaattacactaaaattaatcaatggatatccttcagtagtgaatgcagaaaataaaaatacacaggtatacctaaaggcacttttattgagaatgagaagaactttagatgatgatgtatttatgcccttatatcccaaaaatgtcttagaaaataaaaattctgggccttacttgttttttcaacgacagttttggtcttcagttaaggtcataaaacccccattccagagagggtcctgccccatacccagaaggaaagaatgctgctcagagaggccaagaagaatctggacggacaggccttgtgttgtcttctcttgagcagtagatcatacctttttgtccagtcatgtttctgcatgcctgtacatatttcgttaaacctaaacatagtagacaatttctcctccatctttgggtcttca

SEQ ID NO: 199 - DNA, 2445 bp, Homo sapiens
  misc_feature: Incyte ID No: 4674640CB1
ctgaaggtaaaattttccagatacggcagacggctttcagagtacaataaacagggaatgagaactatttacatggaagtttctttctcatgatgcggtggagaagcctcggccacttggttctgccagatgttcctggggttactgtaaatgggaaggacaggcagagctaaacaaggtttatcatttaaaagtgcctgtgtgaagtcacttttgctggaaaactgcagcttgggagctttctttgtattcacatcccactcttctgtcaagtacactttaccctgaccttatgagtggatgaagatacctcagttgtctgactttgccaattgcttaatttcagaatttaaaaaggggaaagaaaaacatcctgctaaaatatgaacatctgagtgtcttattttccaacatcgtcaatagctgtgagcgtcagcattaaatattctcccaaggagtgccatgatattgaagtcactttattaataacagctgtatctgcaaaacagtcaagagactcggacgttgaaagccagagatgacactgagcatgcttttattgcggcctaccatctttaagtgggacatattgattgatgagtgattgcctgtccatacactctctcatcatcctgttccttggattggacttcactaagcaatttatcactcaccttcagacttacatgtgggagttttcacaacagtagttttggaatcattagaacttggattgatttcatcatttaacagaaacaaacagcccaaattactttatcaccatggctttgaacgttgccccagtcagagatacaaaatggctgacattagaagtctgcagacagtttcaaagaggaacatgctcacgctctgatgaagaatgcaaatttgctcatccccccaaaagttgtcaggttgaaaatggaagagtaattgcctgctttgattccctaaagggccgttgttcgagagagaactgcaagtatcttcaccctccgacacacttaaaaactcaactagaaattaatggaaggaacaatttgattcagcaaaaaactgcagcagcaatgcttgcccagcagatgcaatttatgtttccaggaacaccacttcatccagtgcccactttccctgtaggtcccgcgatagggacaaatacggctattagctttgctccttacctagcacctgtaacccctggagttgggttggtcccaacggaaattctgcccaccacgcctgttattgttcccggaagtccaccggtcactgtcccgggctcaactgcaactcagaaacttctcaggactgacaaactggaggtatgcagggagttccagcgaggaaactgtgcccggggagagaccgactgccgctttgcacaccccgcagacagcaccatgatcgacacaagtgacaacaccgtaaccgtttgtatggattacataaaggggcgttgcatgagggagaaatgcaaatattttcaccctcctgcacacttgcaggccaaaatcaaagctgcgcagcaccaagccaaccaagctgcggtggccgcccaggcagccgcggccgcggccacagtcatggcctttccccctggtgctcttcatcctttaccaaagagacaagcacttgaaaaaagcaatggtaccagcgcggtctttaaccccagcgtcttgcactaccagcaggctctcaccagcgcacagttgcagcaacacgccgcgttcattccaacagataattctgaaataatcagcagaaacggaatggaatgccaagaatctgcattgagaataactaaacattgttactgtacatactatcctgtttcctcctcaatagaattgccacaaactgcatgctaaataaagatgtagttcttctggacagaccacaactctaagaagctagtgctgctatctcatatatgagtattaaatatggtatgcttagtatattccaacctaagatagttaactacctgagaccagctgtgatgtttaaagacataaaggataaagtttacttttaaagggtttctaaacatagtttctgtcctaggaatattgtcttatctccataactatagctgatgcagaaagtccagccagtttactcatttcgattcagaatatttcaaatttagcaataaacaattagcattagttaaaaaagaaacatattccaagggcaggttcgattctagctctaattactgtcatgtcatttacccactggatcaaagggtatgtttcacttcttgacaatataaatgctgcagcaaagatgagaggtgaagtaaaaccgatacctgtcctgcaggtctaaaatttgaatggaaattcaagcacaagtactggggacacatcaaagtgtggtgtttggtttgcctggagatgccacgttgaatcatgtgattctagattaacattaaatagattg

SEQ ID NO: 200 - DNA, 2099 bp, Homo sapiens
  misc_feature: Incyte ID No: 4676066CB1
cttggcgcctctggccaagggattttccgtctctcctgcctggagcagtgactcataagacctaggggatttgcccggaatccccttttttccaggcctggactgtggatgcaggctctttgggaacagtgatcctcaggacagcttaatgcctccttgtgcagtcacccctccgccgcccacctcccaacctaactggcttactctctgcctcttccccgccggaggaagttctcaaattcatctgagcaacactgagaccagcggacggccctgtactaggcctcctgtcagagacccgaggcagacacccagtcagcctgcacgccccccaggcgttcaggaaaggcaccagcctgggctgcaggcacctctggcatattatgggacatcgtggccactccagtcccacctgatgcacagataccactccccagtcacccccttctctcccctgcaaggcctgggacccgagtgtaggtctgtggcctctgccagacctcacactcatggagggtgttgtccacaggctgagcagtccaaagtcctgagcgccgtggaggaccgcatggacgagctgggtgctggcattgcacagtccaggcgcacagtggccctcatcaagagtgcagccgtagcagagcgggagagggtgagccggctgtttgcagatgctgcggccgccctgcagggcttccagacccaggtgctgggcttcatcgaggagggggaagctgccatgctaggccgctcccagggtgacctgcggcgacaggaggaacagcgcagccgcctgagccgagcccgccagaatctcagccaggtccctgaagctgactcagtcagcttcctgcaggagctgctggcactaaggctggccctggaggatgggtgtggccctgggcctggacccccgagggagctcagcttcaccaaatcatcccaagctgtccgtgcagtgagagacatgctggccgtggcctgcgtcaaccagtgggagcagctgagggggccgggtggcaacgaggatgggccacagaagctggactcggaagctgatgctgagccccaagacctcgagagtacgaacctcttggagagtgaagctcccagggactatttcctcaagtttgcctatattgtggatttggacagcgacacagcagacaagttcctgcagctgtttggaaccaaaggtgtcaagagggtgctgtgtcctatcaactaccccttgtcgcccacccgcttcacccattgtgagcaggtgctgggcgagggtgccctggaccgaggcacctactactgggaggtggagattatcgagggctgggtcagcatgggggtcatggccgaagacttctccccacaagagccctacgaccgcggccggctgggccgcaacgcccactcctgctgcctgcagtggaatggacgcagcttctccgtctggtttcatgggctggaggctcccctgccccaccccttctcgcccacggttggggtctgcctggaatacgctgaccgtgccttggccttctatgctgtacgggacggcaagatgagcctcctgcggaggctgaaggcctcccggccccgccggggtggcatcccggcctcccccattgaccccttccagagccgcctggacagtcactttgcggggctcttcacccacagactcaagcctgccttcttcctggagagtgtggacgcccacttgcagatcgggcccctcaagaagtcctgcatatccgtgctgaagaggaggtgatgccgggcacgggcgctcctgctgccgtctctgctccaggaagctgcctcctctgggccctctccttcgtctgggaaggcaccagcatgagtcccacacacccagccttctcatttctagaggcttccacctttttatacactcagccttccctctcccaggcaggaggacccccagaccctgttcccctgcagacctcacttctgggagacagagctacagctgggacagctccaagctaccctaacccctcctttcccaggtttctagaatagtgtctggcatgtagtagatgctcaataaacacttgttgaatgaaaaaaaaaaa

SEQ ID NO: 201 - DNA, 606 bp, Homo sapiens
  misc_feature: Incyte ID No: 4830687CB1
cgggccgcgactgtggtcgtttttataccttcccgcgcggacgccggcgctgccaacggaagggcgggtagggcgagacggagtttcgtcatgttggccaggcccatttgagatctttgaagatatcctcaacgtgaggctctgctgccatgaaggtgaagattaagtgctggaacggcgtggccacttggctctgggtggccaacgatgagaactgtggcatctgcaggatggcatttaacggatgctgccctgactgcaaggtgcccggcgacgactgcccgctggtgtggggccagtgctcccactgcttccacatgcattgcatcctcaagtggctgcacgcacagcaggtgcagcagcactgccccatgtgccgccaggaatggaagttcaaggagtgaggcccgacctggctctcgctggaggggcatcctgagactccttcctcatgctggcgccgatggctgctggggacagcgcccctgagctgcaacaaggtggaaacaagggctggagctgcgtttgttttgccatcactatgttgacacttttatccaataagtgaaaactcattaaactactcaaatcttgaaaaaaaaaaaa

SEQ ID NO: 202 - DNA, 4674 bp, Homo sapiens
  misc_feature: Incyte ID No: 4880891CB1
tggacgtgccagggtcagatctcgcctccgaggaaggtgcagctgaacctggtgttttagaggataccttggtcccagagtcatcatgaaggcccttgatgagcctccctatttgacagtgggcactgatgtgagtgctaaatacagaggagccttttgtgaagccaagatcaagacagcaaaaagacttgtcaaagtcaaggtgacatttagacatgattcttcaacagtggaagttcaggatgaccacataaagggcccactaaaggtaggagctattgtggaagtgaagaatcttgatggtgcatatcaggaagctgttatcaataaactaacagatgcgagttggtacactgtagtttttgatgacggagatgagaagacactgagacgatcttcactgtgcctgaaaggagagaggcattttgctgaaagtgaaacattagaccagctcccactcaccaaccctgagcattttggcactccagtcataggaaagaaaacaaatagaggaagaagatctaatcatataccagaggaagagtcttcatcatcctccagtgatgaagatgaggatgataggaaacagattgatgagctactaggcaaagttgtatgtgtagattacattagtttggataaaaagaaagcactgtggtttcctgcattggtggtttgtcctgattgtagtgatgagattgctgtaaaaaaggacaatattcttgttcgatctttcaaagatggaaaatttacttcagttccaagaaaagatgtccatgaaattactagtgacactgcaccaaagcctgatgctgttttaaagcaagcctttgaacaggcacttgaatttcacaaaagtagaactattcctgctaactggaagactgaattgaaagaagatagctctagcagtgaagcagaggaagaagaggaggaggaagatgatgaaaaagaaaaggaggataatagcagtgaagaagaggaagaaatagaaccatttccagaagaaagggagaactttcttcagcaattgtacaaatttatggaagatagaggtacacctattaacaaacgacctgtacttggatatcgaaatttgaatctctttaagttattcagacttgtacacaaacttggaggatttgataatattgaaagtggagctgtttggaaacaagtctaccaagatcttggaatccctgtcttaaattcagctgcaggatacaatgttaaatgtgcttataaaaaatacttatatggttttgaggagtactgtagatcagccaacattgaatttcagatggcattgccagagaaagttgttaacaagcaatgtaaggagtgtgaaaatgtaaaagaaataaaagttaaggaggaaaatgaaacagagatcaaagaaataaagatggaggaggagaggaatataataccaagagaagaaaagcctattgaggatgaaattgaaagaaaagaaaatattaagccctctctgggaagtaaaaagaatttattagaatctatacctacacattctgatcaggaaaaagaagttaacattaaaaaaccagaagacaatgaaaatctggatgacaaagatgatgacacaactagggtagatgaatccctcaacataaaggtagaagctgaggaagaaaaagcaaaatctggagatgaaacgaataaagaagaagatgaagatgatgaagaagcagaagaggaggaggaggaggaagaagaagaagaggatgaagatgatgatgacaacaatgaggaagaggagtttgagtgctatccaccaggcatgaaagtccaagtgcggtatggacgagggaaaaatcaaaaaatgtatgaagctagtattaaagattctgatgtcgaaggtggagaggtcctttacttggtgcattactgcggatggaatgtgagatacgatgaatggattaaagcagataaaatagtaagacctgctgataaaaatgtgccaaagataaaacatcggaagaaaataaagaataaattagacaaagaaaaagacaaagatgaaaaatactctccaaaaaactgtaaacttcggcgcttgtccaaaccaccatttcagacaaatccatctcctgaaatggtatccaaactggatctcactgatgccaaaaactctgatactgctcatattaagtccatagaaattacttcgatccttaatggacttcaagcttctgaaagttctgctgaagacagtgagcaggaagatgagagaggtgctcaagacatggataataatggcaaagaggaatctaagattgatcatttgaccaacaacagaaatgatcttatttcaaaggaggaacagaacagttcatctttgctagaagaaaacaaagttcatgcagatttggtaatatccaaaccagtgtcaaaatctccagaaagattaaggaaagatatagaagtattatccgaagatactgattatgaagaagatgaagtcacaaaaaagagaaaggatgtcaagaaggacacaacagataaatcttcaaaaccacaaataaaacgtggtaaaagaaggtattgcaatacagaagagtgtctaaaaactggatcacctggcaaaaaggaagagaaggccaagaacaaagaatcactttgcatggaaaacagtagcaacagctcttcagatgaagatgaagaagaaacaaaagcaaagatgacaccaactaagaaatacaatggtttggaggaaaaaagaaaatctctacggacaactggtttctattcaggattttcagaagtggcagaaaaaaggattaaacttttaaataactctgatgaaagacttcaaaacagcagggccaaagatcgaaaagatgtctggtcaagtattcagggacagtggcctaaaaaaacgctgaaagagcttttttcagactctgatactgaggctgcagcttctccaccgcatcctgccccagaggagggggtggcagaggagtcactgcagactgtggctgaagaggagagttgttcacccagtgtagaactagaaaaaccacctccagtcaatgtcgatagtaaacccattgaagaaaaaacagtagaggtcaatgacagaaaagcagaatttccaagtagtggcagtaattcagtgctaaatacccctcctactacacctgaatcgccttcatcagtcactgtaacagaaggcagccggcagcagtcttctgtaacagtatcagaaccactggctccaaaccaagaagaggttcgaagtatcaagagtgaaactgatagcacaattgaggtggatagtgttgctggggagctccaagacctccagtctgaagggaatagctcgccagcaggttttgatgccagtgtgagctcaagcagtagtaatcagccagaaccagaacatcctgaaaaagcctgtacaggtcagaaaagagtgaaagatgctcagggaggaggaagttcatcaaaaaagcagaaaagaagccataaagcaacagtggtaaacaacaaaaagaagggaaaaggcacaaatagtagtgatagtgaagaactttcagctggtgaaagtataactaagagtcagccagtcaaatcagtttccactggaatgaagtctcatagtaccaaatctcccgcaaggacgcagtctccaggaaaatgtggaaagaatggtgataaggatcctgatctcaaggaacccagtaatcgattacccaaagtttacaaatggagttttcagatgtcggacctggaaaatatgacaagtgccgaacgcatcacaattcttcaagaaaaacttcaagaaatcagaaaacattatctgtcattaaaatctgaagtagcttccattgatcggaggagaaagcgtttaaagaagaaagagagagaaagtgctgctacatcctcatcctcctcttcaccttcatccagttccataacagctgctgttatgttaactttagctgaaccgtcaatgtccagcgcatcacaaaatggaatgtcagttgagtgcaggtgacagcaggacttgctaaagcactttgcacttaatggctgttgagggccactttttttttatactgcacagtggcacaaaaaaatatcagacaagcactattttatatttaaaaattgtttcttgacaagctgacttggcacttaagtgcacttttttatgaagaaaaagtacaatgaactgcttttcctcaagcaataattgtttccaacttgtctgggaattgtgtgtctggtaactggaaggccttccactgtggcaaatggaggcttttcactgcctgtagagacaatacagtaagcatagttaaggggtgggtcagaacatgttaagataacttactgtatatgtattcccttgtattttgttaaagctggaacatttgatatttttccatttatttatgaaaaaatatgaacctattttcatttgtacaaggtaattgttttttaaagcaagtcaccttagggtggctttaattgtataagtcaagcacatgtaataaattcaaaacctgcagttaacaggatattagacatcaatcctggtaaccaaatattaaagattctctttaaaaaagactgaacatgtttacaggtttgaattaggctaaaaggtcttgcagtggcttttcatggcccttcaaattggaa

SEQ ID NO: 203 - DNA, 1736 bp, Homo sapiens
  misc_feature: Incyte ID No: 4909754CB1
cgcggttgtgcgggggcgacggcgaggccggaagatggcctgggtgctcaagatggacgaggtgatcgagtccgggctggtgcacgacttcgacgccagcctctcgggcatcgggcaggaactgggcgccggcgcttacagcatgagtgatgtcttggcattgcccattttcaagcaggaagattccagccttccattggatggtgaaacagagcacccaccctttcagtatgtgatgtgtgctgcaacgtcaccagcagtaaaactgcatgatgaaacgcttacttatttgaaccaaggtcagtcatatgaaattcggatgctggataatcggaaaatgggtgatatgcctgagatcagtggaaaattagtaaagagcatcataagggttgtattccatgacagacggctacaatacacagagcatcagcaacttgaaggatggaagtggaatcgcccaggagacagacttcttgatttagatattccaatgtctgtgggaataattgacacaaggacgaatccaagccagttaaatgcggttgaatttctgtgggacccagcaaaacgcacctctgctttcattcaggtacactgcatcagcacagaatttactccacggaagcacggaggtgaaaagggagtgccctttaggatccaggttgacacctttaagcagaatgaaaatggagaatacacagatcatctacactcagctagctgccaaatcaaagtttttaagcctaaaggtgcagacaggaaacaaaaaactgaccgagagaagatggagaagagaacagctcatgaaaaagaaaagtatcagccgtcctatgataccacaatcctcacagagtgttctccgtggcccgatgcccccacagcctatgtgaataacagcccttccccagcgcccactttcacctccccacagcagagcacttgcagtgtcccagacagcaattcttcttccccaaatcatcagggagatggagcttcacagacctctggtgaacaaattcagccttcagctacgatccaggaaacacagcaatggctgctcaaaaacagattctcttcctacacaagactgttctctaatttttcaggtgccgacttattaaaactgacaaaggaggatttagttcaaatttgtggtgcagccgatggaattcggctctataattcactgaagtcaaggtcggttagaccccgtttaaccatctatgtctgccgggagcagccaagcagcacagtgctgcaagggcagcagcaagctgcaagcagtgcaagcgagaatggcagtggggcaccctatgtttatcatgcaatctacttggaagaaatgattgcctcagaagttgctcgaaaacttgcgctggtgtttaatatccctctccaccaaattaatcaggtttacagacagggtcccactggtattcacattcttgttagtgatcagatggttcagaattttcaagatgagagttgttttttattctccacagtaaaagctgaaagtagtgatggcatccacataattttgaaatgatgtcttatatagactgaactgtattcagtaccaaatagtcacgcttaaaagtgtgtgaagactgaatccaagaagtcttgggattggattttaccatatgaaatgtttcatattgaaaacacaagatgacctttctaatgagctgtatgagaggtgaatctcctcactgtcactgccatagccaagc

SEQ ID NO: 204 - DNA, 1393 bp, Homo sapiens
  misc_feature: Incyte ID No: 4911931CB1
ctcttttcgcggcgttctccacctgcgcgggcctgaatggccttcaggagcacagtcggcctgaggagttgatggttactcaccgccgtgagcccaagtaactcgccctccttcggctagaaaccctccgcctgggcccgcgcgacaggagcgcggtctctgaggggagcggcgaccccgccagccccggtctctttccctggcggcggcggcttcttccgtgggacaatatgttcaagagaatggccgaatttgggcctgactccggcgggagagtaaagggtgttactatcgttaaaccaatagtttacggtaatgttgctcggtattttggaaagaaaagagaagaagatgggcacactcatcagtggacagtatatgtgaaaccatatagaaatgaggatatgtcagcatatgtgaagaaaatccagtttaaattacatgaaagctatggcaatcctttaagagttgttactaaacctccatatgaaattactgaaacaggatggggtgaattcgaaataatcatcaaaatatttttcattgaccctaatgaaagacctgtaaccctgtatcatttgctaaagctgtttcaatcagacaccaatgcaatgctggggaaaaagacagtggtttcagagttctatgatgaaatgatatttcaagacccaacagcaatgatgcaacaattattgacaacatctcgtcagctaacattaggagcctataagcatgaaacagaatttgcagagcttgaagtgaaaaccagagaaaaattagaagctgctaagaaaaaaacaagctttgagattgcagagcttaaggagagattaaaagcaagtcgtgaaactataaattgtttaaaaaatgaaatcagaaaacttgaagaagatgaccaagcaaaagacatataaacagttctcatgagaacttggtagtaagctaaactgaaaataaggtgggcttcactggagaaatggacttactgcaaatgctgtgatgtttcttagaggaacttcatatacagctgttgaccatgaatttcttagcaataggaatttgtactatttaagcaatctttaatggaaaatatgtgtgtaagaatggatgctatataggtattttaccaacccattttaagaaaattctatgatattaagcacagtttttaaaaatgtttattgtagtatatgtatagcttattacccttttgacaggcatcaaaatttcattataaagtattacttgtacaaattttgtacttctttagtggctagaattagtgaagaaacttaatgtgtatatttaatttcttcaagttcttacctgcccccatccttttttgtatatgatgtgtccagtaagtattcaataaatgtagtttacagatcct

SEQ ID NO: 205 - DNA, 804 bp, Homo sapiens
  misc_feature: Incyte ID No: 4920433CB1
agcaagacctgtgagagtgcacagtgccacttcgccccatggctgaagatggtttgcccaaaatttattctcatcctccaacagaaagcagtaaaacaccaactgcagcaaccattttctttggggctgacaatgctattcccaaatcagaaacaactattacttcagaaggagaccacgtcacttcagtaaatgaatatatgctagaaagcgatttttcaacaactacagacaacaaactgacagctaaaaaggaaaaactcaaatcagaagatgatatggggaccgactttattaagtcaacaactcacctacagaaagaaattacctctctgactggcactacaaactccataacaagagactctattaccgaacatttcatgccagtgaaaattgggaatatttcatcaccagttactactgtttctttaatagatttttccactgacatagcaaaagaagatatcctcttagctaccattgacacaggagatgcagagatctcaataacctctgaagtctctggcacactaaaggacagcagtgctggtgttgctgacgctcctgcctttccacgtaaaaaggatgaagctgatatgagcaattataattcctccatcaaatccaatgtccctgctgatgaagctgtccaggtcactgattccattattcctgaggctgaaatcctcctgctcctgaagaaacctcactactattccagacataactgcccttgaagaagagaaaataaccgaaattgacctaagtggttttagaagatgacacaagtgctgtggctaa

SEQ ID NO: 206 - DNA, 2046 bp, Homo sapiens
  misc_feature: Incyte ID No: 5042113CB1
cccacgcgtccgagcggcggcgctcgggaggaagtgccgatcggctgctggggcgaaaagggggcgccgggccgctctagccgccctggtccagcgcctccctctctcagcatggacgaggagagcctggagtcggccttgcagacctaccgtgcgcagctgcagcaggtggagctggccttgggcgccggcctggattcgtctgagcaggctgacctgcgccagctgcagggggacctgaaggagctcatcgagctcaccgaggccagcctggtgtctgtcaggaagagcaggttgttggccgcgctggacgaagagcgcccgggccgccaggaagatgctgagtaccaggctttccgggaggccatcactgaggcggtggaggcaccagcagcggcccgtgggtccggatcagagaccgttcctaaagcagaggcggggccagaatctgcggcaggtgggcaggaggaggaagagggagaggacgaggaagagctgagtgggacaaaggtgagcgcgccctactacagctcctggggcactctggagtatcacaacgccatggtggtgggaacggaagaggcggaggatggctcggcgggtgtccgtgtgctttacctgtaccccactcacaagtctctgaagccgtgcccgttcttcctggagggaaagtgccgctttaaggagaactgcaggttctcccatgggcaggtggtctctctggatgagctgcgccccttccaggacccagacctgagctccctgcaggccggctctgcgtgtctggccaagcaccaggatggcctctggcacgcagcacgcatcaccgatgtggacaacggctactacacagtcaagtttgactcgctgctgctgagggaggccgtggtggagggggacggcatcctgcccccactgcgcacagaggccacagagtccgactcagacagcgacggtacgggtgactccagctatgccagagtggtggggtcagatgctgtggactctgggacctgcagctctgcctttgctggctgggaggtgcacacgcgaggtataggctccagactcctcaccaagatgggctatgagtttggcaagggtttgggccgacacgcggaaggccgggtggagcccatccatgctgtggtgttgcctcgagggaagtcgctggaccagtgtgtggagaccctgcagaagcagaccagggttggcaaggctggcaccaacaagccccccaggtgccggggaagaggggccaggcctgggggccgcccagctcctcggaatgtgtttgacttcctcaatgaaaagctgcaaggtcaggctcctggggccctagaagccggggcggccccagcggggaggaggagcaaggacatgtaccatgccagcaagagtgccaagcgggccctgagcctgcggctcttccagactgaggagaagatcgagcgaacccagcgggacatcaggagcatccaggaggctctcgcccgcaacgctggccggcatagcgtggcgtcagcccagctgcaggagaagctggcaggagcccagcgccagctggggcagctccgggctcaggaagccggcctgcagcaggagcagaggaaggcagacacccacaagaagatgactgagttctagagaccccacaagcactatggacgaagcgtgggaccccagcacgggctgccctcaggaagaccagtgttgcccgaggaggggccggcctgctggcctggggcgtgcggacactgctgagtggagacagagctgcggggtcccatctggacacttacttgcccacctgccagtgtcttgggcatttccttggcaaggacattaaagtgatttcatcacagtgtcattcagtggagatcagctggctgcagggtctctggggagagaagggtctgtgcagggctgtggtgagagacgggctgggctggaggggcctaggaggccgcgtctttctccgagaaagacgcggcttccccgggctccagagaaggcccgcgtctaaataaacgccagcgcaggatg

SEQ ID NO: 207 - DNA, 832 bp, Homo sapiens
  misc_feature: Incyte ID No: 5083853CB1
ggaaccttgccggtccgaggcagctctgcgcgtcccctcctgcgcttagcatcctcggcccagcgcggcccgcaccgccatggaggtgctggagagcggggagcagggcgtgctgcagtgggaccgcaagctgagcgagctgtcagagcccggggacggcgaggccctcatgtaccacacgcacttctcagaacttctggatgagttttcccagaacgtcttgggtcagctcctgaatgatcctttcctctcagagaagagtgtgtcaatggaggtggaaccttccccgacgtccccggcgcctctcatccaggctgagcacagctactccctgtgcgaggagcctcgggcccagtcgcccttcacccacattaccagtgacagcttcaatgacgatgaggtggaaagtgagaaatggtacctgtctacagacttcccttcaacatccatcaagacagagccaattacagacgaaccacccccaggactcgttccgtctgtcactctgaccatcacagccatctccaccccgttggaaaaggaggaacctcctctggaaatgaacactggggttgattcctcgtgccagaccattattcctaaaattaagctggagcctcatgaagtggatcagtttctaaacttctctcctaaagaaggtctgtctgccctccctgtgtccctttgggttatggatatggtctctgggtctacagagagggaatatggcgagagagctgggatgagtttgtaccacagatgttgtagctggctttatgaaatagctctgttcttaaaaaataaaaattttgcttccaaataaaaaaaaaaa

SEQ ID NO: 208 - DNA, 1801 bp, Homo sapiens
  misc_feature: Incyte ID No: 5283981CB1
aggaggcggggccgctactaaagcccaagactcccggcctggggcagcctggggagggacgcgggcggggacggagctcggcgtgcttgctgctggagggtgatggccctgcaaggctgtgggctccgacctcaccgggagtcgacagcgagaggttcgccgaagagcgaggttctgggcgagcgctgaacgccggccccaagcaccccgggtctttacacagtccgcgtccacagactctgacgaagacgtggatctgctctcgctttagctgctcgcggtcctccagatcatgtccgcgactcctgcgactccgcgcggaaaaaaaagtttgccaggcgtggactcaatgacctttccaagctgtgcgcctcgctgcctggaccgggtctgagcgcggctgcccaggttgacctttctgcgggagggctttctctacgtgctgttgtctcactgggtttttgtcggagccccacgccctccggcctctgattcctggaagaaagggttggtcccctcagcacccccagcatcccggaaaatggggagcaaggctctgccagcgcccatcccgctccacccgtcgctgcagctcaccaattactccttcctgcaggccgtgaacaccttcccggccacggtggaccacctgcagggcctgtacggtctcagcgcggtacagaccatgcacatgaaccactggacgctggggtatcccaatgtgcacgagatcacccgctccaccatcacggagatggcggcggcgcagggcctcgtggacgcgcgcttccccttcccggccctgccttttaccacccacctattccaccccaagcagggggccattgcccacgtcctcccagccctgcacaaggaccggccccgttttgactttgccaatttggcggtggctgccacgcaagaggatccgcctaagatgggagacctgagcaagctgagcccaggactgggtagccccatctcgggcctcagtaaattgactccggacagaaagccctctcgaggaaggttgccctccaaaacgaaaaaagagtttatctgcaagttttgcggcagacactttaccaaatcctacaatttgctcatccatgagaggacccacacggacgagaggccgtacacgtgtgacatctgccacaaggccttccggaggcaagatcacctgcgggatcacagatacatccattccaaagaaaaacccttcaaatgtcaggagtgtgggaaaggattttgtcagtctagaactctagcagttcacaaaactttacacatgcagacatcaagccctacagctgcgagcagtgcggcaaagtgttcaggcgaaactgtgatctgcggcggcacagcctgactcacaccccgcggcaggacttctagagaagcccaggatctgtcccgtgccgccgctgctcccctccccagacacctctccacgtctcctacccagggggtcgcatccctagcccttcactgaccccagctcttcccttgctgcagccgcacctgcagctccagggagttaactcttcttctgggggactgagaactgtagaaagccacacactactacatcccttcacaaagagtatatgctagtttcttgtagatattcacagctcattttagagctctgtacataatgttgtgggtctttgttttgttgttttgtttgctttgggatcttgttggatgcacttagatatggaaaatggaagccaaattttatctttaaagactgtattttcaaaataaaactttttcttgtttgtttcaaaaaaaa

SEQ ID NO: 209 - DNA, 1596 bp, Homo sapiens
  misc_feature: Incyte ID No: 5510549CB1
cagcaccctcggatgcccctccagcggctcgacaacgacgtggacctgcgtggggaccagccctccctgggcagcttcacctactccacctctgcgcctggcccagccctttccccgtcggtgcccctgcactacctgccccacgatccgctgcaccaggagctgtcctttggtgtgccatattctcacatgatgccacggagactgagcacccagagataccgcctgcagcagccactgcccccgccgcccccacccccacccccaccaccctactaccccagcttcctgccctacttcctctcgatgctgccaatgtcaccaacagcaatggggcccaccatcagcctggacctggacgtggatgatgtggagatggagaactatgaggccctcctgaacctggccgagcggctgggagatgccaagccccggggtctcaccaaagcagacatagagcagctcccgtcgtaccgctttaacccggacagccatcagtcggagcagacgctgtgtgtggtctgcttcagtgacttcgaggcgcggcagctgctccgagtcctcccctgcaaccatgagttccacaccaagtgtgttgacaagtggttgaaggccaaccggacgtgtcccatctgccgggccgacgcctccgaggtgcccagggaggctgagtgaggccacgcagccgcctgcccgggagaaccctgcctgaagctctggaaacttgtgggtggggcccagggaggatggggagggagtggcccaggcctgccccttcgctcctgcctgcatttccagagctggtgccagggtcagcccagcgaggagtccctgcaataagcccctgcatttgccaagctccaaagactccctccctagtctgcctgcccgcccgcccgccacggagctgcctgagtgtccctgatcgggtctccctcctgtgcaccctcaggtccctccttttcctgctggcactgagtgccaggggtccgctccctcagtggggccggtggagatccttggccccaggatgggcagacagagcaccatcctgggtcagaaggtctcatgctctgaaatggcgtgccctctgcccaggtggcactgccaggtgcgtagacagacggtgtcacgagccatttcctgagccccagggctgaatcccccctccttgaccccgaacagtgaactcaggcagctggctctgtgttggctgctgtgagggctgagtctggttccctaggggaccctcatcccaggaacaacattccagccccaccctcaggctggagggcgtcccagcctaatcccgagctggggcacacgtatcctgaggggcttgggccatacggggagagggagccctgtgttcccggtggttgtccctcccagggatgcagccagacccgtgcccaatctcctctccctctgttgttttgcatgaacgtgaggagcagcagtttttgttcattcatttggcccaaaatcacgtgtaggatttggggatgtggatatttaagacaatttcttttttcttttggtttaataggggcgggtatagggaccaactgggaccgagtgcccagggggccgagc

SEQ ID NO: 210 - DNA, 2374 bp, Homo sapiens
  misc_feature: Incyte ID No: 5544862CB1
gctggaacacagtgtcagggaagaagatgaaaaaaccttccacttctggacaaaatttccattctgatgtggattacagagggccaaagaatccaagcaagccaataaaagccccatcagcactacctcctcgactgcagcatccttcaggagtaagacaacatgcgttctctagtcattcttcagggtcacagtctcagaaattctccagtgagcacaaaaatcttagccggacaccttcacagatcataaggtaacctgatcgtgaaagagttgaggattttgatcaccaagtcgagaatctaactatttcggcctttccccagaagagcgcagagagaagcaagctatagaagaatcccgtttactctatgagattcagaacagagatgaacaggctttcccagccctttccagctcatcagtcaatcagtcagcttctcagagtagcaatccatgtgtccagagaaaatcatcacatgtaggtgatagaaaaggaagcaggcggagaatggatacagaagaacgaaaagacaaagactctattcatggacatagtcagttggataaaagacccgaaccaagcacattggagaatattactgatgataaatatgcaacagtttcatcaccatcaaagtcaaagaagttagagtgcccttctcctgcggaacaaaagccagcagaacatgtgtctttgtcaaatccagctccccttctagtttctccagaggtacatctaactcctgcggtgccttctttaccagccactgtgccagcctggccaagtgaacctacaacttttggaccaacaggtgtccctgctccaattcccgttttgtcagtgacacagactttgaccactggacctgattcagctgtatcccaagctcatttaacaccctctccagttcctgtgtcaatacaggcagttaaccagcccttgatgcctttgcctcagacattgagcctttatcaagacccactctatcctgggtttccttgtaatgaaaagggagatcgagccattgtaccaccttattcactgtgtcagactggggaggacctacctaaagataagaatattcttcgattcttcttcaatcttggtgtgaaggcatacagttgtcctatgtgggccccacattcttacctgtaccctctgcaccaggcctacctggcagcctgcaggatgtacccaaaggtccctgtccctgtttatcctcataatccctggttccaagaggctcctgctgctcagaatgaaagtgattgtacctgtactgatgcccactttcctatgcagactgaggccagtgttaatggtcaaatgccacagccagagattggaccgccgacattttcttcacctctggttatccctccatctcaggtgtctgaaagtcatggacaattgtcttaccaggctgatcttgaatctgagacccctgggcagcttctgcatgctgattatgaagagtcactaagtggcaagaatatgttcccccagccatcttttggacccaatccattcttaggcccagttcctattgcacctcctttctttcctcatgtttggtatgggtacccttttcagggattcatagaaaatccagtaatgaggcagaatattgtcctgccctctgatgaaaaaggagaattggatctgtctctggaaaatctggatctgtctaaagattgtggttcagtttcaacagtagatgagtttccagaagccaggggtgaacatgtacattctctccctgaagcaagtgtgagcagtaagccggacgaaggccggacagagcaatcttcccagacacgaaaggcagatacggcattggcttccatccctcctgtagcagagggaaaggctcatcctcccactcagattctaaacagagagagagaaactgtgcctgttgaacttgaacctaaaaggaccattcaaagcctgaaagaaaaaaaaaaaaaagtaaaagatcctaagactgctgctgatgtggtcagccctggggccaactctgttgatagcagagtgcaaagaccaaaagaagagagttcagaagatgaaaatgaagtgtctaatattttgagaagtggtagatccaagcagttctataatcaaacttatggaagcaggaagtacaaaagtgattggggctattctggtaggggtggatatcaacatgtgagaagtgaggagtcctggaaaggacagccaagcagaagtcgggatgaaggttatcagtaccatcgaaatgtcagagggcgaccatttaggggagataggaggagatcagggatgggagatggccataggggacagcacacttgatggttgttgccgaagtattttctaacagaaactctt

SEQ ID NO: 211 - DNA, 2598 bp, Homo sapiens
  misc_feature: Incyte ID No: 5573394CB1
ggaataaacatttaaagactcccccggggacctggaggatggacttttccatggtggatttgaaatccaagaagagagcaaacagtttgttgccagatatggtaaagtgtcagctggtgagatagctgtcacgggagcagggaggcttccctgcaaacagatcatccatgctgttgggcctcggtggatggaatgggataaacagggatgtactggaaagctgcagagggccattgtaagtattctgaattatgtcatctataaaaatactcacattaagacagtagcaattccagccttgagctctgggatttttcagttccctctgaatttgtgtacaaagactattgtagagactatccgggttagtttgcaagggaagccaatgatgagtaatttgaaagaaattcacctggtgagcaatgaggaccctactgttgctgcctttaaagctgcttcagaattcatcctagggaagagtgagctgggacaagaaaccaccccttctttcaatgcaatggtcgtgaacaacctgaccctccagattgtccagggccacattgaatggcagacggcagatgtaattgttaattctgtaaacccacatgatattacagttggacctgtggcaaagtcaattctacaacaagcaggagttgaaatgaaatcggaatttcttgccacaaaggctaaacagtttcaacggtcccagttggtactggtcacaaaaggatttaacttgttctgtaaatatatataccatgtactgtggcattcagaatttcctaaacctcagatattaaaacatgcaatgaaggagtgtttggaaaaatgcattgagcaaaatataacttccatttcctttcctgcccttgggactggaaacatggaaataaagaaggaaacagcagcagagattttgtttgatgaagttttaacatttgccaaagaccatgtaaaacaccagttaactgtaaaatttgtgatctttccaacagatttggagatatataaggctttcagttctgaaatggcaaagaggtccaagatgctgagtttgaacaattacagtgtcccccagtcaaccagagaggagaaaagagaaaatgggcttgaagctagatctcctgccatcaatctgatgggattcaacgtggaagagatgtgtgaggcccacgcatggatccaaagaatcctgagtctccagaaccaccacatcattgagaataatcatattctgtaccttgggagaaaggaacatgacattttgtctcagcttcagaaaacttcaagtgtctccatcacagaaattatcagcccaggaaggacagagttagagattgaaggagcccgggctgacctcattgaggtggttatgaacattgaagatatgctttgtaaagtacaggaggaaatggcaaggaaaaaggagcgaggcctttggcgctcgttaggacagtggactattcagcaacaaaaaacccaagacgaaatgaaagaaaatatcatatttctgaaatgtcctgtgcctccaactcaagagcttctagatcaaaagaaacagtttgaaaaatgtggtttgcaggttctaaaggtggagaagatagacaatgaggtccttatggctgcctttcaaagaaagaagaaaatgatggaagaaaaactgcacaggcaacctgtgagccataggctgtttcagcaagtcccataccagttctgcaatgtggtatgcagagttggctttcaaagaatgtactcgacaccttgcgatccaaaatacggagctggcatatacttcaccaagaacctcaaaaacctggcagagaaggccaagaaaatctctgctgcagataagctgatctatgtgtttgaggctgaagtactcacaggcttcttctgccagggacatccgttaaatattgttcccccaccactgagtcctggagctatagatggtcatgacagtgtggttgacaatgtctccagccctgaaacctttgttatttttagtggcatgcaggctatacctcagtatttgtggacatgcacccaggaatatgtacagtcacaagattactcatcaggaccaatgagaccctttgcacagcatccttggaggggattcgcaagtggcagccctgttgattaatctctacatcattttaacagctggtatggccttaccttgggtgaactaaccaaataatgaccatcgatggctcaaagagtggcttgaatatatcccatgggttatctgtatggactgactgggttattgaaaggactagccacatactagcatcttagtgcctttatctgtctttatgtcttggggttggggtaggtagataccaaatgaaacactttcaggaccttccttcctcttgcagttgttctttaatctcctttactagaggagataaatattttgcatataatgaagaaatttttctagtatataacgcaggccttttattttctaaaatgatgatagtataaaaatgttaggataacagaatgattttagattttccagagaatattataaagtgctttaggtatgaaaataaatcatctttgtctgataaaaaaaaaaaa

SEQ ID NO: 212 - DNA, 2495 bp, Homo sapiens
  misc_feature: Incyte ID No: 5850840CB1
ctcgcaggaggcgaacgcgcgaccccagcggacccgcggcccagccttgatcccccaaccccgggggctggcatgagcggcccctcggcggcaccgtggggcggtggagtcgcctccgcctgatccccggcctgtcgcccgaccccacctcgccaaccgaggcggaccgcggagtgtgcgaacgaccccaccgctgctttctcctcccccagatcacgcaccccagctccggaagatggggaactgcctcaaatcccccacctcggatgacatctccctgcttcacgagtctcagtccgaccgggctagctttggcgaggggacggagccggatcaggagccgccgccgccatatcaggaacaagttccagttccagtctaccacccaacacctagccagactcggctagcaactcagctgactgaagaggaacaaattaggatagctcaaagaataggtcttatacaacatctgcctaaaggagtttatgaccctggaagagatggatcagaaaaaaagatccgggagtgtgtgatctgtatgatggactttgtttatggggacccaattcgatttctgccgtgcatgcacatctatcacctggactgtatagatgactggttgatgagatccttcacgtgcccctcctgcatggagccagttgatgcagcactgctttcatcctatgagactaattgagccagggtctcttatctgacttcaagtgaaccaccattttggtggttttgatcttttgtcactgagcccaaagagccagggattaggaattaagatcgtgcacaaaagtttccttaaaattcctggatggctgcagatgttgggggaaaaagtacgtgatattttagaaacttagtgggaaaagtaggatggtatttttatgtaaagccttgacccaatgtttaaaaatataattgtatttagatcttgttattgctccagtacataggaattgtgtaaagtgttaacagcagctgtatttgtttaaattgtgtgtattgaagattaggaaaaagatagtagttatttttcctaaatgaaataactttcttctcttccccttccccacccgaattcttttctgaagttgctggcatttgggtcaaggttttattaaaagctacattttataacactggcacacacaaaaaagtagttttaagcttgtttgcacagttctttttttccattggaaatggaattcattgccttaggtctttttaaatagtgtattattatcgttggggctggctctatgcttgaaaaccagtttatttataacctgttataagtgctatattctgtttgcagttaggaaatgcagaattcaaagtgatctcctagcttgtaagcaaactgagatgcactatcccttttctataaaaaataagttaatgtgtcaagaaaccaactctattaaggtggggtttaatattaccctttcctatgtgttttatctaattattttggttgttaatatggtgataatggaaagtcaagttaaattttaaatattaagaattctgatttattgagattgaattatgccaccacgtttatgtaaaaatgaaggtggcaccgtggtgagacctaatgagaaatagttactcagttgtaaaaattttgatttattctctttcttctgacctccttgcctcttgtcttgaaccatagcaaaaggatactgcatctctcattactgtagtgctgaggttattgaagttatacaaaacacatctcagtctctgtttcttggaaaggtatctattacatcctgctagctgactgacaaaactaagcagggagaataaagataattgtattttatgttttgcacacaaacgcagaatttgtataaccatatgacttcatagttgtgatctcaaaaaagaaggaatttctcctttgtttcttgcagttaatgtaagaatactttaaatctctaagcttctgaagtgttagaggtagagatggtctagtaaagatgtagtagtaatgttttatccatttagcatgtgtttattttttcatatgtactcaaaggtgacttattggttcacctcagtgatattacagctaaaaaaatcattcattagcaaaaggaaaagtggtctcaacctaacatcagaagtgtttcttattattattttatattgagttgaatattgaactctaacagttttctacatacaaaacacagtgtcatgaaggttattcataattgcattatagaggaatgtagtatgtcataagtactttgtaaagatttgacattcaactgtagtatccatatgttgcttaaatttccttatgagccccatgatggaaagacttaaagatgaatttgagaaaaattgaaagaaattagattatcaggttctgttaaattgttacatgtatcttgcttaaatttctgtttattaatttatatccacccaagtacataaagcaaatttggaggaaaaaaaaaaaaaaa

SEQ ID NO: 213 - DNA, 1153 bp, Homo sapiens
  misc_feature: Incyte ID No: 5942936CB1
gggatgaagcgcccctgcgaggagacgacctccgagagcgacatggacgagaccatcgacgtggggagcgagaacaattactcggggcaaagtactagctctgtgattagattgaattctccaacaacaacatctcagattatggcaagaaagaaaaggagagggattatagagaaaaggcgtcgggatcggataaataacagtttatctgagttgagaagacttgtgccaactgcttttgaaaaacaaggatctgcaaagttagaaaaagctgaaatattgcaaatgacagtggatcatttgaagatgcttcaggcaacagggggtaaaggctactttgacgcacacgctcttgccatggacttcatgagcataggattccgagagtgcctaacagaagttgcgcggtacctgagctccgtggaaggcctggactcctcggatccgctgcgggtgcggcttgtgtctcatctcagcacttgcgccacccagcgggaggcggcggccatgacatcctccatggcccaccaccatcatccgctccacccgcatcactgggccgccgccttccaccacctgcccgcagccctgctccagcccaacggcctccatgcctcagagtcaaccccttgtcgcctctccacaacttcagaagtgcctcctgcccacggctctgctctcctcacggccacgtttgcccatgcggattcagccctccgaatgccatccacgggcagcgtcgccccctgcgtgccacctctctccacctctctcttgtccctctctgccaccgtccacgccgcagccgcagcagccaccgcggctgcacacagcttccctctgtccttcgcgggggcattccccatgcttcccccaaacgcagcagcagcagtggccgcggccacagccatcagcccgcccttgtcagtatcagccacgtccagtcctcagcagaccagcagtggaacaaacaataaaccttaccgaccctgggggacagaagttggagctttttaaatttttcttgaacttcttgcaatagtaactgaatgtcctccatttcagagtcagcttaaaacctctgcaccctgaaggtagccatacagatgccgacagatccacaaaggaacaataaagctatttgagacacaaa

SEQ ID NO: 214 - DNA, 2194 bp, Homo sapiens
  misc_feature: Incyte ID No: 5951431CB1
tgggaaggagagaaaatggcggcggagccgaacaagaccgaaatccagactctttttaagaggcttcgcgcagttccaaccaacaaggcctgttttgactgcggcgccaagaatccgagttgggccagcatcacgtacggtgttttcttgtgcattgactgttccggggtgcaccgctccctgggcgtccatctgagcttcatcaggtccacagagttggattccaactggaactggttccagctgaggtgtatgcaggtcggcgggaatgccaatgcgacggctttttttcgccaacatggatgcacagccaatgatgccaacaccaaatataatagccgagctgcccagatgtaccgggagaagatccggcagctggggagtgcggccctggctaggcatggcactgatctttggatagacaacatgagtagtgccgttcctaatcactccccagagaagaaggactctgatttcttcacagaacacactcaaccccctgcctgggatgcgccagccactgagccttcagggacccagcagccagccccgtctacagagagcagtggcctggcacagccggagcatggccccaacacagacctgcttggcacctcacccaaagcctcactggagtccgtgtatctgtcagctaaaggggcccttcctgccagagaactgaaaagctccatcattggcaagaagaagccagcagcagctaagaaagggctgggtgccaagaaaggcctaggggcccagaaggtgagcagccagagcttcagtgagattgagcggcaggctcaggtggcagagaagctccgtgagcagcaggcagccgatgccaagaagcaggcggaggagtccatggtcgcctccatgcgtctggcctaccaggagctccagattgatcgtaagaaagaggaaaagaagctacagaatctggaagggaagaagcgagagcaggcagaaaggttgggcatgggcttggtatcccgaagctctgtctcccactccgtgctgtctgagatgcaggtgattgagcaggaaaccccagtgagtgcaaaatcctctcgctcgcagctggacttgtttgacgatgttggtactttcgcctctggacccccaaagtacaaggacaatcccttttccttaggggaaagctttggctcccgctgggatacagatgctgcctggggtatggacagggtagaggagaaggagccagaagtgaccatctcaagcatccggcctatttcagaaagagccacaaaccggagggaagtggagagccggagctcaggcctcgagtctagtgaggcgcgtcagaaattcgcaggagccaaagccatctcatctgacatgttctttgggcgggaggtggatgcggagtatgaggccaggtctcggctgcagcagctctcaggcagcagtgccatcagctcttcagacctctttggggacatggatggagctcacggagcaggaagtgtatctctggggaacgtgctgcctacagcggacattgcccagtttaagcagggtgtcaagtctgtggctgggaaaatggctgtgctggccaatggtgtgatgaattccttgcaggatcgctacggttcctactgatccgagctctgtgactcaggcttacgatggtgacggcaacaagaactccacagttcccaggctggggatgctttgccttgtggaagctggggaggatttgttacttcgtatgtgtggtgtgtgtgtggggtggcctttgaggcgctcactcctgtgaggggaatggtcagtaccagcccttgtcctctgcctgtggactgagccctttattccctctcacaccaccctccgtgtgttagactcttgtccttctgtcctgcccccacagctgctgctcacttatcctgccatactgggaaagggggttcccccacgatggcttattctgggtccagactttccccaggtagggaaagcggaaggtagaaggctttttttgctggctctagggttcttctagttcgaggccttgggtccccatcctctggaaccagggggaggcctggaaggagttcactgtagacccgtcccatggggaaagaggctgcggacttgctgctgctgctgctgccagtggcctcttctgggtgccaggagaggggaaggacctttgtctgggcgttaccaaggg

What is claimed is:

1. An isolated polypeptide comprising an amino acid sequence selected from the group consisting of:
a) an amino acid sequence selected from the group consisting of SEQ ID NO:1-107,
b) a naturally occurring amino acid sequence having at least 90% sequence identity to an amino acid sequence selected from the group consisting of SEQ ID NO:1-107,
c) a biologically active fragment of an amino acid sequence selected from the group consisting of SEQ ID NO:1-107, and
d) an immunogenic fragment of an amino acid sequence selected from the group consisting of SEQ ID NO:1-107.

2. An isolated polypeptide of claim 1 selected from the group consisting of SEQ ID NO:1-107.

3. An isolated polynucleotide encoding a polypeptide of claim 1.

4. An isolated polynucleotide encoding a polypeptide of claim 2.

5. An isolated polynucleotide of claim 4 selected from the group consisting of SEQ ID NO:108-214.

6. A recombinant polynucleotide comprising a promoter sequence operably linked to a polynucleotide of claim 3.

7. A cell transformed with a recombinant polynucleotide of claim 6.

8. A transgenic organism comprising a recombinant polynucleotide of claim 6.

9. A method for producing a polypeptide of claim 1, the method comprising:
a) culturing a cell under conditions suitable for expression of the polypeptide, wherein said cell is transformed with a recombinant polynucleotide, and said recombinant polynucleotide comprises a promoter sequence operably linked to a polynucleotide encoding the polypeptide of claim 1, and
b) recovering the polypeptide so expressed.

10. An isolated antibody which specifically binds to a polypeptide of claim 1.

11. An isolated polynucleotide comprising a polynucleotide sequence selected from the group consisting of:
a) a polynucleotide sequence selected from the group consisting of SEQ ID NO:108-214,
b) a naturally occurring polynucleotide sequence having at least 90% sequence identity to a polynucleotide sequence selected from the group consisting of SEQ ID NO:108-214,
c) a polynucleotide sequence complementary to a),
d) a polynucleotide sequence complementary to b), and
e) an RNA equivalent of a)-d).

12. An isolated polynucleotide comprising at least 60 contiguous nucleotides of a polynucleotide of claim 11.

13. A method for detecting a target polynucleotide in a sample, said target polynucleotide having a sequence of a polynucleotide of claim 11, the method comprising:
a) hybridizing the sample with a probe comprising at least 20 contiguous nucleotides comprising a sequence complementary to said target polynucleotide in the sample, and which probe specifically hybridizes to said target polynucleotide, under conditions whereby a hybridization complex is formed between said probe and said target polynucleotide or fragments thereof, and
b) detecting the presence or absence of said hybridization complex, and, optionally, if present, the amount thereof.

14. A method of claim 13, wherein the probe comprises at least 60 contiguous nucleotides.

15. A method for detecting a target polynucleotide in a sample, said target polynucleotide having a sequence of a polynucleotide of claim 11, the method comprising:
a) amplifying said target polynucleotide or fragment thereof using polymerase chain reaction amplification, and
b) detecting the presence or absence of said amplified target polynucleotide or fragment thereof, and, optionally, if present, the amount thereof.

16. A composition comprising an effective amount of a polypeptide of claim 1 and a pharmaceutically acceptable excipient.

17. A composition of claim 16, wherein the polypeptide comprises an amino acid sequence selected from the group consisting of SEQ ID NO:1-107.

18. A method for treating a disease or condition associated with decreased expression of functional TRFX, comprising administering to a patient in need of such treatment the composition of claim 16.

19. A method for screening a compound for effectiveness as an agonist of a polypeptide of claim 1, the method comprising:
a) exposing a sample comprising a polypeptide of claim 1 to a compound, and
b) detecting agonist activity in the sample.

20. A composition comprising an agonist compound identified by a method of claim 19 and a pharmaceutically acceptable excipient.

21. A method for treating a disease or condition associated with decreased expression of functional BOX, comprising administering to a patient in need of such treatment a composition of claim 20.

22. A method for screening a compound for effectiveness as an antagonist of a polypeptide of claim 1, the method comprising:
a) exposing a sample comprising a polypeptide of claim 1 to a compound, and
b) detecting antagonist activity in the sample.

23. A composition comprising an antagonist compound identified by a method of claim 22 and a pharmaceutically acceptable excipient.

24. A method for treating a disease or condition associated with overexpression of functional TRFX, comprising administering to a patient in need of such treatment a composition of claim 23.

25. A method of screening for a compound that specifically binds to the polypeptide of claim 1, said method comprising the steps of:
a) combining the polypeptide of claim 1 with at least one test compound under suitable conditions, and
b) detecting binding of the polypeptide of claim 1 to the test compound, thereby identifying a compound that specifically binds to the polypeptide of claim 1.

26. A method of screening for a compound that modulates the activity of the polypeptide of claim 1, said method comprising:
a) combining the polypeptide of claim 1 with at least one test compound under conditions permissive for the activity of the polypeptide of claim 1,
b) assessing the activity of the polypeptide of claim 1 in the presence of the test compound, and
c) comparing the activity of the polypeptide of claim 1 in the presence of the test compound with the activity of the polypeptide of claim 1 in the absence of the test compound, wherein a change in the activity of the polypeptide of claim 1 in the presence of the test compound is indicative of a compound that modulates the activity of the polypeptide of claim 1.

27. A method for screening a compound for effectiveness in altering expression of a target polynucleotide, wherein said target polynucleotide comprises a sequence of claim 5, the method comprising:
a) exposing a sample comprising the target polynucleotide to a compound, under conditions suitable for the expression of the target polynucleotide,
b) detecting altered expression of the target polynucleotide, and
c) comparing the expression of the target polynucleotide in the presence of varying amounts of the compound and in the absence of the compound.

28. A method for assessing toxicity of a test compound, said method comprising:
a) treating a biological sample containing nucleic acids with the test compound;
b) hybridizing the nucleic acids of the treated biological sample with a probe comprising at least 20 contiguous nucleotides of a polynucleotide of claim 11 under conditions whereby a specific hybridization complex is formed between said probe and a target polynucleotide in the biological sample, said target polynucleotide comprising a polynucleotide sequence of a polynucleotide of claim 11 or fragment thereof;
c) quantifying the amount of hybridization complex; and
d) comparing the amount of hybridization complex in the treated biological sample with the amount of hybridization complex in an untreated biological sample, wherein a difference in the amount of hybridization complex in the treated biological sample is indicative of toxicity of the test compound.
d) comparing the amount of hybridization complex in the treated biological sample with the amount of hybridization complex in an untreated biological sample wherein a difference in the amount of hybridization complex in the treated biological sample is indicative of toxicity of the test compound.

29. A method of claim 9, wherein the polypeptide has the sequence of SEQ ID NO:1.

30. A method of claim 9, wherein the polypeptide has the sequence of SEQ ID NO:2.

31. A method of claim 9, wherein the polypeptide has the sequence of SEQ ID NO:3.

32. A method of claim 9, wherein the polypeptide has the sequence of SEQ ID NO:4.

33. A method of claim 9, wherein the polypeptide has the sequence of SEQ ID NO:5.

34. A method of claim 9, wherein the polypeptide has the sequence of SEQ ID NO:6.

35. A method of claim 9, wherein the polypeptide has the sequence of SEQ ID NO:7.

36. A method of claim 9, wherein the polypeptide has the sequence of SEQ ID NO:8.

37. A method of claim 9, wherein the polypeptide has the sequence of SEQ ID NO:9.

38. A method of claim 9, wherein the polypeptide has the sequence of SEQ ID NO:10.

39. A method of claim 9, wherein the polypeptide has the sequence of SEQ ID NO:11.

40. A method of claim 9, wherein the polypeptide has the sequence of SEQ ID NO:12.

41. A method of claim 9, wherein the polypeptide has the sequence of SEQ ID NO:13.

42. A method of claim 9, wherein the polypeptide has the sequence of SEQ ID NO:14.

43. A method of claim 9, wherein the polypeptide has the sequence of SEQ ID NO:15.

44. A method of claim 9, wherein the polypeptide has the sequence of SEQ ID NO:16.

45. A method of claim 9, wherein the polypeptide has the sequence of SEQ ID NO:17.

46. A method of claim 9, wherein the polypeptide has the sequence of SEQ ID NO:18.

47. A method of claim 9, wherein the polypeptide has the sequence of SEQ ID NO:19.

48. A method of claim 9, wherein the polypeptide has the sequence of SEQ ID NO:20.

49. A method of claim 9, wherein the polypeptide has the sequence of SEQ ID NO:21.

50. A method of claim 9, wherein the polypeptide has the sequence of SEQ ID NO:22.

51. A method of claim 9, wherein the polypeptide has the sequence of SEQ ID NO:23.

52. A method of claim 9, wherein the polypeptide has the sequence of SEQ ID NO:24.

53. A method of claim 9, wherein the polypeptide has the sequence of SEQ ID NO:25.

54. A method of claim 9, wherein the polypeptide has the sequence of SEQ ID NO:26.

55. A method of claim 9, wherein the polypeptide has the sequence of SEQ ID NO:27.

56. A method of claim 9, wherein the polypeptide has the sequence of SEQ ID NO:28.

57. A method of claim 9, wherein the polypeptide has the sequence of SEQ ID NO:29.

58. A method of claim 9, wherein the polypeptide has the sequence of SEQ ID NO:30.

59. A method of claim 9, wherein the polypeptide has the sequence of SEQ ID NO:31.

60. A method of claim 9, wherein the polypeptide has the sequence of SEQ ID NO:32.

61. A method of claim 9, wherein the polypeptide has the sequence of SEQ ID NO:33.

62. A method of claim 9, wherein the polypeptide has the sequence of SEQ ID NO:34.

63. A method of claim 9, wherein the polypeptide has the sequence of SEQ ID NO:35.

64. A method of claim 9, wherein the polypeptide has the sequence of SEQ ID NO:36.

65. A method of claim 9, wherein the polypeptide has the sequence of SEQ ID NO:37.

66. A method of claim 9, wherein the polypeptide has the sequence of SEQ ID NO:38.

67. A method of claim 9, wherein the polypeptide has the sequence of SEQ ID NO:39.

68. A method of claim 9, wherein the polypeptide has the sequence of SEQ ID NO:40.

69. A method of claim 9, wherein the polypeptide has the sequence of SEQ ID NO:41.

70. A method of claim 9, wherein the polypeptide has the sequence of SEQ ID NO:42.

71. A method of claim 9, wherein the polypeptide has the sequence of SEQ ID NO:43.

72. A method of claim 9, wherein the polypeptide has the sequence of SEQ ID NO:44.

73. A method of claim 9, wherein the polypeptide has the sequence of SEQ ID NO:45.

74. A method of claim 9, wherein the polypeptide has the sequence of SEQ ID NO:46.

75. A method of claim 9, wherein the polypeptide has the sequence of SEQ ID NO:47.

76. A method of claim 9, wherein the polypeptide has the sequence of SEQ ID NO:48.

77. A method of claim 9, wherein the polypeptide has the sequence of SEQ ID NO:49.

78. A method of claim 9, wherein the polypeptide has the sequence of SEQ ID NO:50.

79. A method of claim 9, wherein the polypeptide has the sequence of SEQ ID NO:51.

80. A method of claim 9, wherein the polypeptide has the sequence of SEQ ID NO:52.

81. A method of claim 9, wherein the polypeptide has the sequence of SEQ ID NO:53.

82. A method of claim 9, wherein the polypeptide has the sequence of SEQ ID NO:54.

83. A method of claim 9, wherein the polypeptide has the sequence of SEQ ID NO:55.

84. A method of claim 9, wherein the polypeptide has the sequence of SEQ ID NO:56.

85. A method of claim 9, wherein the polypeptide has the sequence of SEQ ID NO:57.

86. A method of claim 9, wherein the polypeptide has the sequence of SEQ ID NO:58.

87. A method of claim 9, wherein the polypeptide has the sequence of SEQ ID NO:59.

88. A method of claim 9, wherein the polypeptide has the sequence of SEQ ID NO:60.

89. A method of claim 9, wherein the polypeptide has the sequence of SEQ ID NO:61.

90. A method of claim 9, wherein the polypeptide has the sequence of SEQ ID NO:62.

91. A method of claim 9, wherein the polypeptide has the sequence of SEQ ID NO:63.

92. A method of claim 9, wherein the polypeptide has the sequence of SEQ ID NO:64.

93. A method of claim 9, wherein the polypeptide has the sequence of SEQ ID NO:65.

94. A method of claim 9, wherein the polypeptide has the sequence of SEQ ID NO:66.

95. A method of claim 9, wherein the polypeptide has the sequence of SEQ ID NO:67.

96. A method of claim 9, wherein the polypeptide has the sequence of SEQ ID NO:68.

97. A method of claim 9, wherein the polypeptide has the sequence of SEQ ID NO:69.

98. A method of claim 9, wherein the polypeptide has the sequence of SEQ ID NO:70.

99. A method of claim 9, wherein the polypeptide has the sequence of SEQ ID NO:71.

100. A method of claim 9, wherein the polypeptide has the sequence of SEQ ID NO:72.

101. A method of claim 9, wherein the polypeptide has the sequence of SEQ ID NO:73.

102. A method of claim 9, wherein the polypeptide has the sequence of SEQ ID NO:74.

103. A method of claim 9, wherein the polypeptide has the sequence of SEQ ID NO:75.

104. A method of claim 9, wherein the polypeptide has the sequence of SEQ ID NO:76.

105. A method of claim 9, wherein the polypeptide has the sequence of SEQ ID NO:77.

106. A method of claim 9, wherein the polypeptide has the sequence of SEQ ID NO:78.

107. A method of claim 9, wherein the polypeptide has the sequence of SEQ ID NO:79.

108. A method of claim 9, wherein the polypeptide has the sequence of SEQ ID NO:80.

109. A method of claim 9, wherein the polypeptide has the sequence of SEQ ID NO:81.

110. A method of claim 9, wherein the polypeptide has the sequence of SEQ ID NO:82.

111. A method of claim 9, wherein the polypeptide has the sequence of SEQ ID NO:83.

112. A method of claim 9, wherein the polypeptide has the sequence of SEQ ID NO:84.

113. A method of claim 9, wherein the polypeptide has the sequence of SEQ ID NO:85.

114. A method of claim 9, wherein the polypeptide has the sequence of SEQ ID NO:86.

115. A method of claim 9, wherein the polypeptide has the sequence of SEQ ID NO:87.

116. A method of claim 9, wherein the polypeptide has the sequence of SEQ ID NO:88.

117. A method of claim 9, wherein the polypeptide has the sequence of SEQ ID NO:89.

118. A method of claim 9, wherein the polypeptide has the sequence of SEQ ID NO:90.

119. A method of claim 9, wherein the polypeptide has the sequence of SEQ ID NO:91.

120. A method of claim 9, wherein the polypeptide has the sequence of SEQ ID NO:92.

121. A method of claim 9, wherein the polypeptide has the sequence of SEQ ID NO:93.

122. A method of claim 9, wherein the polypeptide has the sequence of SEQ ID NO:94.

123. A method of claim 9, wherein the polypeptide has the sequence of SEQ ID NO:95.

124. A method of claim 9, wherein the polypeptide has the sequence of SEQ ID NO:96.

125. A method of claim 9, wherein the polypeptide has the sequence of SEQ ID NO:97.

126. A method of claim 9, wherein the polypeptide has the sequence of SEQ ID NO:98.

127. A method of claim 9, wherein the polypeptide has the sequence of SEQ ID NO:99.

128. A method of claim 9, wherein the polypeptide has the sequence of SEQ ID NO:100.

129. A method of claim 9, wherein the polypeptide has the sequence of SEQ ID NO:101.

130. A method of claim 9, wherein the polypeptide has the sequence of SEQ ID NO:102.

131. A method of claim 9, wherein the polypeptide has the sequence of SEQ ID NO:103.

132. A method of claim 9, wherein the polypeptide has the sequence of SEQ ID NO:104.

133. A method of claim 9, wherein the polypeptide has the sequence of SEQ ID NO:105.

134. A method of claim 9, wherein the polypeptide has the sequence of SEQ ID NO:106.

135. A method of claim 9, wherein the polypeptide has the sequence of SEQ ID NO:107.

136. A diagnostic test for a condition or disease associated with the expression of human transcription factors (TRFX) in a biological sample comprising the steps of:
a) combining the biological sample with an antibody of claim 10, under conditions suitable for the antibody to bind the polypeptide and form an antibody:polypeptide complex; and
b) detecting the complex wherein the presence of the complex correlates with the presence of the polypeptide in the biological sample.

137. The antibody of claim 10, wherein the antibody is:
a) a chimeric antibody,
b) a single chain antibody,
c) a Fab fragment,
d) a F(ab′)₂ fragment, or
e) a humanized antibody.

138. A composition comprising an antibody of claim 10 and an acceptable excipient.

139. A method of diagnosing a condition or disease associated with the expression of human transcription factors (TRFX) in a subject, comprising administering to said subject an effective amount of the composition of claim 138.

140. A composition of claim 138, wherein the antibody is labeled.

141. A method of diagnosing a condition or disease associated with the expression of human transcription factors (TRFX) in a subject, comprising administering to said subject an effective amount of the composition of claim 140.

142. A method of preparing a polyclonal antibody with the specificity of the antibody of claim 10 comprising:
a) immunizing an animal with a polypeptide having an amino acid sequence selected from the group consisting of SEQ ID NO:1-107 or an immunogenic fragment thereof, under conditions to elicit an antibody response;
b) isolating antibodies from said animal; and
c) screening the isolated antibodies with the polypeptide, thereby identifying a polyclonal antibody which binds specifically to a polypeptide having an amino acid sequence selected from the group consisting of SEQ ID NO:1-107.

143. An antibody produced by a method of claim 142.

144. A composition comprising the antibody of claim 143 and a suitable carrier.

145. A method of making a monoclonal antibody with the specificity of the antibody of claim 10 comprising:
a) immunizing an animal with a polypeptide having an amino acid sequence selected from the group consisting of SEQ ID NO:1-107 or an immunogenic fragment thereof, under conditions to elicit an antibody response;
b) isolating antibody producing cells from the animal;
c) fusing the antibody producing cells with immortalized cells to form monoclonal antibody-producing hybridoma cells;
d) culturing the hybridoma cells; and
e) isolating from the culture monoclonal antibody which binds specifically to a polypeptide having an amino acid sequence selected from the group consisting of SEQ ID NO:1-107.

146. A monoclonal antibody produced by a method of claim 145.

147. A composition comprising the antibody of claim 146 and a suitable carrier.

148. The antibody of claim 10, wherein the antibody is produced by screening a Fab expression library.

149. The antibody of claim 10, wherein the antibody is produced by screening a recombinant immunoglobulin library.

150. A method for detecting a polypeptide having an amino acid sequence selected from the group consisting of SEQ ID NO:1-107 in a sample, comprising the steps of:
a) incubating the antibody of claim 10 with a sample under conditions to allow specific binding of the antibody and the polypeptide; and
b) detecting specific binding, wherein specific binding indicates the presence of a polypeptide having an amino acid sequence selected from the group consisting of SEQ ID NO:1-107 in the sample.

151. A method of purifying a polypeptide having an amino acid sequence selected from the group consisting of SEQ ID NO:1-107 from a sample, the method comprising:
a) incubating the antibody of claim 10 with a sample under conditions to allow specific binding of the antibody and the polypeptide; and
b) separating the antibody from the sample and obtaining the purified polypeptide having an amino acid sequence selected from the group consisting of SEQ ID NO:1-107.

152. A microarray wherein at least one element of the microarray is a polynucleotide of claim 12.

153. A method for generating a transcript image of a sample which contains polynucleotides, the method comprising the steps of:
a) labeling the polynucleotides of the sample,
b) contacting the elements of the microarray of claim 152 with the labeled polynucleotides of the sample under conditions suitable for the formation of a hybridization complex, and
c) quantifying the expression of the polynucleotides in the sample.

154. An array comprising different nucleotide molecules affixed in distinct physical locations on a solid substrate, wherein at least one of said nucleotide molecules comprises a first oligonucleotide or polynucleotide sequence specifically hybridizable with at least 30 contiguous nucleotides of a target polynucleotide, said target polynucleotide having a sequence of claim 11.

155. An array of claim 154, wherein said first oligonucleotide or polynucleotide sequence is completely complementary to at least 30 contiguous nucleotides of said target polynucleotide.

156. An array of claim 154, wherein said first oligonucleotide or polynucleotide sequence is completely complementary to at least 60 contiguous nucleotides of said target polynucleotide.

157. An array of claim 154, which is a microarray.

158. An array of claim 154, further comprising said target polynucleotide hybridized to said first oligonucleotide or polynucleotide.

159. An array of claim 154, wherein a linker joins at least one of said nucleotide molecules to said solid substrate.

160. An array of claim 154, wherein each distinct physical location on the substrate contains multiple nucleotide molecules having the same sequence, and each distinct physical location on the substrate contains nucleotide molecules having a sequence which differs from the sequence of nucleotide molecules at another physical location on the substrate.

161. A polypeptide of claim 1, comprising the amino acid sequence of SEQ ID NO:1.

162. A polypeptide of claim 1, comprising the amino acid sequence of SEQ ID NO:2.

163. A polypeptide of claim 1, comprising the amino acid sequence of SEQ ID NO:3.

164. A polypeptide of claim 1, comprising the amino acid sequence of SEQ ID NO:4.

165. A polypeptide of claim 1, comprising the amino acid sequence of SEQ ID NO:5.

166. A polypeptide of claim 1, comprising the amino acid sequence of SEQ ID NO:6.

167. A polypeptide of claim 1, comprising the amino acid sequence of SEQ ID NO:7.

168. A polypeptide of claim 1, comprising the amino acid sequence of SEQ ID NO:8.

169. A polypeptide of claim 1, comprising the amino acid sequence of SEQ ID NO:9.

170. A polypeptide of claim 1, comprising the amino acid sequence of SEQ ID NO:10.

171. A polypeptide of claim 1, comprising the amino acid sequence of SEQ ID NO:11.

172. A polypeptide of claim 1, comprising the amino acid sequence of SEQ ID NO:12.

173. A polypeptide of claim 1, comprising the amino acid sequence of SEQ ID NO:13.

174. A polypeptide of claim 1, comprising the amino acid sequence of SEQ ID NO:14.

175. A polypeptide of claim 1, comprising the amino acid sequence of SEQ ID NO:15.

176. A polypeptide of claim 1, comprising the amino acid sequence of SEQ ID NO:16.

177. A polypeptide of claim 1, comprising the amino acid sequence of SEQ ID NO:17.

178. A polypeptide of claim 1, comprising the amino acid sequence of SEQ ID NO:18.

179. A polypeptide of claim 1, comprising the amino acid sequence of SEQ ID NO:19.

180. A polypeptide of claim 1, comprising the amino acid sequence of SEQ ID NO:20.

181. A polypeptide of claim 1, comprising the amino acid sequence of SEQ ID NO:21.

182. A polypeptide of claim 1, comprising the amino acid sequence of SEQ ID NO:22.

183. A polypeptide of claim 1, comprising the amino acid sequence of SEQ ID NO:23.

184. A polypeptide of claim 1, comprising the amino acid sequence of SEQ ID NO:24.

185. A polypeptide of claim 1, comprising the amino acid sequence of SEQ ID NO:25.

186. A polypeptide of claim 1, comprising the amino acid sequence of SEQ ID NO:26.

187. A polypeptide of claim 1, comprising the amino acid sequence of SEQ ID NO:27.

188. A polypeptide of claim 1, comprising the amino acid sequence of SEQ ID NO:28.

189. A polypeptide of claim 1, comprising the amino acid sequence of SEQ ID NO:29.

190. A polypeptide of claim 1, comprising the amino acid sequence of SEQ ID NO:30.

191. A polypeptide of claim 1, comprising the amino acid sequence of SEQ ID NO:31.

192. A polypeptide of claim 1, comprising the amino acid sequence of SEQ ID NO:32.

193. A polypeptide of claim 1, comprising the amino acid sequence of SEQ ID NO:33.

194. A polypeptide of claim 1, comprising the amino acid sequence of SEQ ID NO:34.

195. A polypeptide of claim 1, comprising the amino acid sequence of SEQ ID NO:35.

196. A polypeptide of claim 1, comprising the amino acid sequence of SEQ ID NO:36.

197. A polypeptide of claim 1, comprising the amino acid sequence of SEQ ID NO:37.

198. A polypeptide of claim 1, comprising the amino acid sequence of SEQ ID NO:38.

199. A polypeptide of claim 1, comprising the amino acid sequence of SEQ ID NO:39.

200. A polypeptide of claim 1, comprising the amino acid sequence of SEQ ID NO:40.

201. A polypeptide of claim 1, comprising the amino acid sequence of SEQ ID NO:41.

202. A polypeptide of claim 1, comprising the amino acid sequence of SEQ ID NO:42.

203. A polypeptide of claim 1, comprising the amino acid sequence of SEQ ID NO:43.

204. A polypeptide of claim 1, comprising the amino acid sequence of SEQ ID NO:44.

205. A polypeptide of claim 1, comprising the amino acid sequence of SEQ ID NO:45.

206. A polypeptide of claim 1, comprising the amino acid sequence of SEQ ID NO:46.

207. A polypeptide of claim 1, comprising the amino acid sequence of SEQ ID NO:47.

208. A polypeptide of claim 1, comprising the amino acid sequence of SEQ ID NO:48.

209. A polypeptide of claim 1, comprising the amino acid sequence of SEQ ID NO:49.

210. A polypeptide of claim 1, comprising the amino acid sequence of SEQ ID NO:50.

211. A polypeptide of claim 1, comprising the amino acid sequence of SEQ ID NO:51.

212. A polypeptide of claim 1, comprising the amino acid sequence of SEQ ID NO:52.

213. A polypeptide of claim 1, comprising the amino acid sequence of SEQ ID NO:53.

214. A polypeptide of claim 1, comprising the amino acid sequence of SEQ ID NO:54.

215. A polypeptide of claim 1, comprising the amino acid sequence of SEQ ID NO:55.

216. A polypeptide of claim 1, comprising the amino acid sequence of SEQ ID NO:56.

217. A polypeptide of claim 1, comprising the amino acid sequence of SEQ ID NO:57.

218. A polypeptide of claim 1, comprising the amino acid sequence of SEQ ID NO:58.

219. A polypeptide of claim 1, comprising the amino acid sequence of SEQ ID NO:59.

220. A polypeptide of claim 1, comprising the amino acid sequence of SEQ ID NO:60.

221. A polypeptide of claim 1, comprising the amino acid sequence of SEQ ID NO:61.

222. A polypeptide of claim 1, comprising the amino acid sequence of SEQ ID NO:62.

223. A polypeptide of claim 1, comprising the amino acid sequence of SEQ ID NO:63.

224. A polypeptide of claim 1, comprising the amino acid sequence of SEQ ID NO:64.

225. A polypeptide of claim 1, comprising the amino acid sequence of SEQ ID NO:65.

226. A polypeptide of claim 1, comprising the amino acid sequence of SEQ ID NO:66.

227. A polypeptide of claim 1, comprising the amino acid sequence of SEQ ID NO:67.

228. A polypeptide of claim 1, comprising the amino acid sequence of SEQ ID NO:68.

229. A polypeptide of claim 1, comprising the amino acid sequence of SEQ ID NO:69.

230. A polypeptide of claim 1, comprising the amino acid sequence of SEQ ID NO:70.

231. A polypeptide of claim 1, comprising the amino acid sequence of SEQ ID NO:71.

232. A polypeptide of claim 1, comprising the amino acid sequence of SEQ ID NO:72.

233. A polypeptide of claim 1, comprising the amino acid sequence of SEQ ID NO:73.

234. A polypeptide of claim 1, comprising the amino acid sequence of SEQ ID NO:74.

235. A polypeptide of claim 1, comprising the amino acid sequence of SEQ ID NO:75.

236. A polypeptide of claim 1, comprising the amino acid sequence of SEQ ID NO:76.

237. A polypeptide of claim 1, comprising the amino acid sequence of SEQ ID NO:77.

238. A polypeptide of claim 1, comprising the amino acid sequence of SEQ ID NO:78.

239. A polypeptide of claim 1, comprising the amino acid sequence of SEQ ID NO:79.

240. A polypeptide of claim 1, comprising the amino acid sequence of SEQ ID NO:80.

241. A polypeptide of claim 1, comprising the amino acid sequence of SEQ ID NO:81.

242. A polypeptide of claim 1, comprising the amino acid sequence of SEQ ID NO:82.

243. A polypeptide of claim 1, comprising the amino acid sequence of SEQ ID NO:83.

244. A polypeptide of claim 1, comprising the amino acid sequence of SEQ ID NO:84.

245. A polypeptide of claim 1, comprising the amino acid sequence of SEQ ID NO:85.

246. A polypeptide of claim 1, comprising the amino acid sequence of SEQ ID NO:86.

247. A polypeptide of claim 1, comprising the amino acid sequence of SEQ ID NO:87.

248. A polypeptide of claim 1, comprising the amino acid sequence of SEQ ID NO:88.

249. A polypeptide of claim 1, comprising the amino acid sequence of SEQ ID NO:89.

250. A polypeptide of claim 1, comprising the amino acid sequence of SEQ ID NO:90.

251. A polypeptide of claim 1, comprising the amino acid sequence of SEQ ID NO:91.

252. A polypeptide of claim 1, comprising the amino acid sequence of SEQ ID NO:92.

253. A polypeptide of claim 1, comprising the amino acid sequence of SEQ ID NO:93.

254. A polypeptide of claim 1, comprising the amino acid sequence of SEQ ID NO:94.

255. A polypeptide of claim 1, comprising the amino acid sequence of SEQ ID NO:95.

256. A polypeptide of claim 1, comprising the amino acid sequence of SEQ ID NO:96.

257. A polypeptide of claim 1, comprising the amino acid sequence of SEQ ID NO:97.

258. A polypeptide of claim 1, comprising the amino acid sequence of SEQ ID NO:98.

259. A polypeptide of claim 1, comprising the amino acid sequence of SEQ ID NO:99.

260. A polypeptide of claim 1, comprising the amino acid sequence of SEQ ID NO:100.

261. A polypeptide of claim 1, comprising the amino acid sequence of SEQ ID NO:101.

262. A polypeptide of claim 1, comprising the amino acid sequence of SEQ ID NO:102.

263. A polypeptide of claim 1, comprising the amino acid sequence of SEQ ID NO:103.

264. A polypeptide of claim 1, comprising the amino acid sequence of SEQ ID NO:104.

265. A polypeptide of claim 1, comprising the amino acid sequence of SEQ ID NO:105.

266. A polypeptide of claim 1, comprising the amino acid sequence of SEQ ID NO:106.

267. A polypeptide of claim 1, comprising the amino acid sequence of SEQ ID NO:107.

268. A polynucleotide of claim 11, comprising the polynucleotide sequence of SEQ ID NO:108.

269. A polynucleotide of claim 11, comprising the polynucleotide sequence of SEQ ID NO:109.

270. A polynucleotide of claim 11, comprising the polynucleotide sequence of SEQ ID NO:110.

271. A polynucleotide of claim 11, comprising the polynucleotide sequence of SEQ ID NO:111.

272. A polynucleotide of claim 11, comprising the polynucleotide sequence of SEQ ID NO:112.

273. A polynucleotide of claim 11, comprising the polynucleotide sequence of SEQ ID NO:113.

274. A polynucleotide of claim 11, comprising the polynucleotide sequence of SEQ ID NO:114.

275. A polynucleotide of claim 11, comprising the polynucleotide sequence of SEQ ID NO:115.

276. A polynucleotide of claim 11, comprising the polynucleotide sequence of SEQ ID NO:116.

277. A polynucleotide of claim 11, comprising the polynucleotide sequence of SEQ ID NO:117.

278. A polynucleotide of claim 11, comprising the polynucleotide sequence of SEQ ID NO:118.

279. A polynucleotide of claim 11, comprising the polynucleotide sequence of SEQ ID NO:119.

280. A polynucleotide of claim 11, comprising the polynucleotide sequence of SEQ ID NO:120.

281. A polynucleotide of claim 11, comprising the polynucleotide sequence of SEQ ID NO:121.

282. A polynucleotide of claim 11, comprising the polynucleotide sequence of SEQ ID NO:122.

283. A polynucleotide of claim 11, comprising the polynucleotide sequence of SEQ ID NO:123.

284. A polynucleotide of claim 11, comprising the polynucleotide sequence of SEQ ID NO:124.

285. A polynucleotide of claim 11, comprising the polynucleotide sequence of SEQ ID NO:125.

286. A polynucleotide of claim 11, comprising the polynucleotide sequence of SEQ ID NO:126.

287. A polynucleotide of claim 11, comprising the polynucleotide sequence of SEQ ID NO:127.

288. A polynucleotide of claim 11, comprising the polynucleotide sequence of SEQ ID NO:128.

289. A polynucleotide of claim 11, comprising the polynucleotide sequence of SEQ ID NO:129.

290. A polynucleotide of claim 11, comprising the polynucleotide sequence of SEQ ID NO:130.

291. A polynucleotide of claim 11, comprising the polynucleotide sequence of SEQ ID NO:131.

292. A polynucleotide of claim 11, comprising the polynucleotide sequence of SEQ ID NO:132.

293. A polynucleotide of claim 11, comprising the polynucleotide sequence of SEQ ID NO:133.

294. A polynucleotide of claim 11, comprising the polynucleotide sequence of SEQ ID NO:134.

295. A polynucleotide of claim 11, comprising the polynucleotide sequence of SEQ ID NO:135.

296. A polynucleotide of claim 11, comprising the polynucleotide sequence of SEQ ID NO:136.

297. A polynucleotide of claim 11, comprising the polynucleotide sequence of SEQ ID NO:137.

298. A polynucleotide of claim 11, comprising the polynucleotide sequence of SEQ ID NO:138.

299. A polynucleotide of claim 11, comprising the polynucleotide sequence of SEQ ID NO:139.

300. A polynucleotide of claim 11, comprising the polynucleotide sequence of SEQ ID NO:140.

301. A polynucleotide of claim 11, comprising the polynucleotide sequence of SEQ ID NO:141.

302. A polynucleotide of claim 11, comprising the polynucleotide sequence of SEQ ID NO:142.

303. A polynucleotide of claim 11, comprising the polynucleotide sequence of SEQ ID NO:143.

304. A polynucleotide of claim 11, comprising the polynucleotide sequence of SEQ ID NO:144.

305. A polynucleotide of claim 11, comprising the polynucleotide sequence of SEQ ID NO:145.

306. A polynucleotide of claim 11, comprising the polynucleotide sequence of SEQ ID NO:146.

307. A polynucleotide of claim 11, comprising the polynucleotide sequence of SEQ ID NO:147.

308. A polynucleotide of claim 11, comprising the polynucleotide sequence of SEQ ID NO:148.

309. A polynucleotide of claim 11, comprising the polynucleotide sequence of SEQ ID NO:149.

310. A polynucleotide of claim 11, comprising the polynucleotide sequence of SEQ ID NO:150.

311. A polynucleotide of claim 11, comprising the polynucleotide sequence of SEQ ID NO:151.

312. A polynucleotide of claim 11, comprising the polynucleotide sequence of SEQ ID NO:152.

313. A polynucleotide of claim 11, comprising the polynucleotide sequence of SEQ ID NO:153.

314. A polynucleotide of claim 11, comprising the polynucleotide sequence of SEQ ID NO:154.

315. A polynucleotide of claim 11, comprising the polynucleotide sequence of SEQ ID NO:155.

316. A polynucleotide of claim 11, comprising the polynucleotide sequence of SEQ ID NO:156.

317. A polynucleotide of claim 11, comprising the polynucleotide sequence of SEQ ID NO:157.

318. A polynucleotide of claim 11, comprising the polynucleotide sequence of SEQ ID NO:158.

319. A polynucleotide of claim 11, comprising the polynucleotide sequence of SEQ ID NO:159.

320. A polynucleotide of claim 11, comprising the polynucleotide sequence of SEQ ID NO:160.

321. A polynucleotide of claim 11, comprising the polynucleotide sequence of SEQ ID NO:161.

322. A polynucleotide of claim 11, comprising the polynucleotide sequence of SEQ ID NO:162.

323. A polynucleotide of claim 11, comprising the polynucleotide sequence of SEQ ID NO:163.

324. A polynucleotide of claim 11, comprising the polynucleotide sequence of SEQ ID NO:164.

325. A polynucleotide of claim 11, comprising the polynucleotide sequence of SEQ ID NO:165.

326. A polynucleotide of claim 11, comprising the polynucleotide sequence of SEQ ID NO:166.

327. A polynucleotide of claim 11, comprising the polynucleotide sequence of SEQ ID NO:167.

328. A polynucleotide of claim 11, comprising the polynucleotide sequence of SEQ ID NO:168.

329. A polynucleotide of claim 11, comprising the polynucleotide sequence of SEQ ID NO:169.

330. A polynucleotide of claim 11, comprising the polynucleotide sequence of SEQ ID NO:170.

331. A polynucleotide of claim 11, comprising the polynucleotide sequence of SEQ ID NO:171.

332. A polynucleotide of claim 11, comprising the polynucleotide sequence of SEQ ID NO:172.

333. A polynucleotide of claim 11, comprising the polynucleotide sequence of SEQ ID NO:173.

334. A polynucleotide of claim 11, comprising the polynucleotide sequence of SEQ ID NO:174.

335. A polynucleotide of claim 11, comprising the polynucleotide sequence of SEQ ID NO:175.

336. A polynucleotide of claim 11, comprising the polynucleotide sequence of SEQ ID NO:176.

337. A polynucleotide of claim 11, comprising the polynucleotide sequence of SEQ ID NO:177.

338. A polynucleotide of claim 11, comprising the polynucleotide sequence of SEQ ID NO:178.

339. A polynucleotide of claim 11, comprising the polynucleotide sequence of SEQ ID NO:179.

340. A polynucleotide of claim 11, comprising the polynucleotide sequence of SEQ ID NO:180.

341. A polynucleotide of claim 11, comprising the polynucleotide sequence of SEQ ID NO:181.

342. A polynucleotide of claim 11, comprising the polynucleotide sequence of SEQ ID NO:182.

343. A polynucleotide of claim 11, comprising the polynucleotide sequence of SEQ ID NO:183.

344. A polynucleotide of claim 11, comprising the polynucleotide sequence of SEQ ID NO:184.

345. A polynucleotide of claim 11, comprising the polynucleotide sequence of SEQ ID NO:185.

346. A polynucleotide of claim 11, comprising the polynucleotide sequence of SEQ ID NO:186.

347. A polynucleotide of claim 11, comprising the polynucleotide sequence of SEQ ID NO:187.

348. A polynucleotide of claim 11, comprising the polynucleotide sequence of SEQ ID NO:188.

349. A polynucleotide of claim 11, comprising the polynucleotide sequence of SEQ ID NO:189.

350. A polynucleotide of claim 11, comprising the polynucleotide sequence of SEQ ID NO:190.

351. A polynucleotide of claim 11, comprising the polynucleotide sequence of SEQ ID NO:191.

352. A polynucleotide of claim 11, comprising the polynucleotide sequence of SEQ ID NO:192.

353. A polynucleotide of claim 11, comprising the polynucleotide sequence of SEQ ID NO:193.

354. A polynucleotide of claim 11, comprising the polynucleotide sequence of SEQ ID NO:194.

355. A polynucleotide of claim 11, comprising the polynucleotide sequence of SEQ ID NO:195.

356. A polynucleotide of claim 11, comprising the polynucleotide sequence of SEQ ID NO:196.

357. A polynucleotide of claim 11, comprising the polynucleotide sequence of SEQ ID NO:197.

358. A polynucleotide of claim 11, comprising the polynucleotide sequence of SEQ ID NO:198.

359. A polynucleotide of claim 11, comprising the polynucleotide sequence of SEQ ID NO:199.

360. A polynucleotide of claim 11, comprising the polynucleotide sequence of SEQ ID NO:200.

361. A polynucleotide of claim 11, comprising the polynucleotide sequence of SEQ ID NO:201.

362. A polynucleotide of claim 11, comprising the polynucleotide sequence of SEQ ID NO:202.

363. A polynucleotide of claim 11, comprising the polynucleotide sequence of SEQ ID NO:203.

364. A polynucleotide of claim 11, comprising the polynucleotide sequence of SEQ ID NO:204.

365. A polynucleotide of claim 11, comprising the polynucleotide sequence of SEQ ID NO:205.

366. A polynucleotide of claim 11, comprising the polynucleotide sequence of SEQ ID NO:206.

367. A polynucleotide of claim 11, comprising the polynucleotide sequence of SEQ ID NO:207.

368. A polynucleotide of claim 11, comprising the polynucleotide sequence of SEQ ID NO:208.

369. A polynucleotide of claim 11, comprising the polynucleotide sequence of SEQ ID NO:209.

370. A polynucleotide of claim 11, comprising the polynucleotide sequence of SEQ ID NO:210.

371. A polynucleotide of claim 11, comprising the polynucleotide sequence of SEQ ID NO:211.

372. A polynucleotide of claim 11, comprising the polynucleotide sequence of SEQ ID NO:212.

373. A polynucleotide of claim 11, comprising the polynucleotide sequence of SEQ ID NO:213.

374. A polynucleotide of claim 11, comprising the polynucleotide sequence of SEQ ID NO:214.
